United States Patent Application Publication US 2026/0250318 A1, published August 27, 2026 (application 18/998,358).

The application's sequence listing, which the Patent Office published only in electronic form, follows.

SEQUENCE LISTING (6411 sequences)

SEQ ID NO: 1 - protein, 743 aa, synthetic construct
MAADGYLPDWLEDNLSEGIREWWALKPGAPQPKANQQHQDNARGLVLPGYKYLGPGNGLDKGEPVNAADAAALEHDKAYDQQLKAGDNPYLKYNHADAEFQERLKEDTSFGGNLGRAVFQAKKRLLEPLGLVEEAAKTAPGKKRPVEQSPQEPDSSAGIGKSGAQPAKKRLNFGQTGDTESVPDPQPIGEPPAAPSGVGSLTMASGGGAPVADNNEGADGVGSSSGNWHCDSQWLGDRVITTSTRTWALPTYNNHLYKQISNSTSGGSSNDNAYFGYSTPWGYFDFNRFHCHFSPRDWQRLINNNWGFRPKRLNFKLFNIQVKEVTDNNGVKTIANNLTSTVQVFTDSDYQLPYVLGSAHEGCLPPFPADVFMIPQYGYLTLNDGSQAVGRSSFYCLEYFPSQMLRTGNNFQFSYEFENVPFHSSYAHSQSLDRLMNPLIDQYLYYLSKTINGSGQNQQTLKFSVAGPSNMAVQGRNYIPGPSYRQQRVSTTVTQNNNSEFAWPGASSWALNGRNSLMNPGPAMASHKEGEDRFFPLSGSLIFGKQGTGRDNVDADKVMITNEEEIKTTNPVATESYGQVATNHQSDGTLAVPFKAQAQTGWVQNQGILPGMVWQDRDVYLQGPIWAKIPHTDGNFHPSPLMGGFGMKHPPPQILIKNTPVPADPPTAFNKDKLNSFITQYSTGQVSVEIEWELQKENSKRWNPEIQYTSNYYKSNNVEFAVNTEGVYSEPRPIGTRYLTRNL

SEQ ID NO: 2 - protein, 6 aa, synthetic construct
HDSPHK

SEQ ID NO: 3 - DNA, 18 bp, synthetic construct
  source 1..18: mol_type = other DNA
cacgacagcccacacaaa

SEQ ID NO: 4 - DNA, 2492 bp, Homo sapiens
  source 1..2492: mol_type = genomic DNA
atactccatacctgggatttccgcctcgccgctctccgactgcttccagacatgcaggggccctgggtgctgctcctgctgggcctgaggctacagctctccctgggcatcatcccagttgaggaggagaacccggacttctggaaccgccaggcagccgaggccctgggtgccgccaagaagctgcagcctgcacagacagccgccaagaacctcatcatcttcctgggtgacgggatgggggtgtctacggtgacagctgccaggatcctaaaagggcagaagaaggacaaactggggcctgagaccttcctggccatggaccgcttcccgtacgtggctctgtccaagacatacagtgtagacaagcatgtgccagacagtggagccacagccacggcctacctgtgcggggtcaagggcaacttccagaccattggcttgagtgcagccgcccgctttaaccagtgcaacacgacacgcggcaacgaggtcatctccgtgatgaatcgggccaagaaagcaggaaagtcagtgggagtggtaaccaccacacgggtgcagcatgcctcgccagccggcgcctacgcccacacggtgaaccgcaactggtactcggatgccgacgtgcctgcctcggcccgccaggaggggtgccaggacatcgccacgcagctcatctccaacatggacattgatgtgatcctaggtggaggccgaaagtacatgtttcccatggggaccccagaccctgagtacccagatgactacagccaaggtgggaccaggctggacgggaagaatctggtgcaggaatggctggcgaagcaccagggtgcccggtacgtgtggaaccgcactgagctcctgcaggcttccctggacccgtctgtgacccatctcatgggtctctttgagcctggagacatgaaatacgagatccaccgagactccacactggacccctccctgatggagatgacagaggctgccctgctcctgctgagcaggaacccccgcggcttcttcctcttcgtggagggtggtcgcatcgaccatggtcatcatgaaagcagggcttaccgggcactgactgagacgatcatgttcgacgacgccattgagagggcgggccagctcaccagcgaggaggacacgctgagcctcgtcactgccgaccactcccacgtcttctccttcggaggctaccccctgcgagggagctccatcttcgggctggcccctggcaaggcccgggacaggaaggcctacacggtcctcctatacggaaacggtccaggctatgtgctcaaggacggcgcccggccggatgttacggagagcgagagcgggagccccgagtatcggcagcagtcagcagtgcccctggacggagagacccacgcaggcgaggacgtggcggtgttcgcgcgcggcccgcaggcgcacctggttcacggcgtgcaggagcagaccttcatagcgcacgtcatggccttcgccgcctgcctggagccctacaccgcctgcgacctggcgccccgcgccggcaccaccgacgccgcgcacccggggccgtccgtggtccccgcgttgcttcctctgctggcagggaccttgctgctgctggggacggccactgctccctgagtgtcccgtccctggggctcctgcttccccatcccggagttcccctgctccccacctccagtcgtcctgccggacctccacctggagctgtcacccccggagtcgccacacagacgtcctgccatggaaccttcccctcccggtgcaccctggggaccgagcccttgacaccacgccctttgctttatcttgctcttgaaattttggccccaactccagggactggggatttgtgcctggcagctgcctgcatttcaggaaaagaggaggctcagaccatccagcccccgcccatatcctgaggtggatcaggcaggctctctccccggggacatgaggcacccatacctaggaccccctgcgccttttttagcttcagtcatggcagcacctgagggacacaaggacttgggtgcatcaggacgccttggagaagcgtggcttcctgccaccctgcaacccaccctcccagccaaggaggctgctgtggtggggatccccaggggggctttgacacagtcctctgctgtccctccactgggctaattctacacccctgtgcccctcctaggggcccatgagtcagagaggcttgccccaagtcacagccactcagatgttcgacgccccctaaggtccattccagcacccacctgagttccgaggagcacctgggaagctctgggtgcaggatagcagtccagagtccatggccccgcctaggccatctgggtgctgggcatggatttctcagcaaggaagactcattaccttccctccctgggcctccattcttctgggaaacacaaagcaataataaaaggaagtgttagacaatgtaa

SEQ ID NO: 5 - protein, 532 aa, Homo sapiens
MQGPWVLLLLGLRLQLSLGIIPVEEENPDFWNRQAAEALGAAKKLQPAQTAAKNLIIFLGDGMGVSTVTAARILKGQKKDKLGPETFLAMDRFPYVALSKTYSVDKHVPDSGATATAYLCGVKGNFQTIGLSAAARFNQCNTTRGNEVISVMNRAKKAGKSVGVVTTTRVQHASPAGAYAHTVNRNWYSDADVPASARQEGCQDIATQLISNMDIDVILGGGRKYMFPMGTPDPEYPDDYSQGGTRLDGKNLVQEWLAKHQGARYVWNRTELLQASLDPSVTHLMGLFEPGDMKYEIHRDSTLDPSLMEMTEAALLLLSRNPRGFFLFVEGGRIDHGHHESRAYRALTETIMFDDAIERAGQLTSEEDTLSLVTADHSHVFSFGGYPLRGSSIFGLAPGKARDRKAYTVLLYGNGPGYVLKDGARPDVTESESGSPEYRQQSAVPLDGETHAGEDVAVFARGPQAHLVHGVQEQTFIAHVMAFAACLEPYTACDLAPRAGTTDAAHPGPSVVPALLPLLAGTLLLLGTATAP

SEQ ID NO: 6 - DNA, 2754 bp, Homo sapiens
  source 1..2754: mol_type = genomic DNA
atactccatgcccagaattcctgcctcgccactgtcctgctgccctccagacatgctggggccctgcatgctgctgctgctgctgctgctgggcctgaggctacagctctccctgggcatcatcccagttgaggaggagaacccggacttctggaaccgcgaggcagccgaggccctgggtgccgccaagaagctgcagcctgcacagacagccgccaagaacctcatcatcttcctgggcgatgggatgggggtgtctacggtgacagctgccaggatcctaaaagggcagaagaaggacaaactggggcctgagatacccctggccatggaccgcttcccatatgtggctctgtccaagacatacaatgtagacaaacatgtgccagacagtggagccacagccacggcctacctgtgcggggtcaagggcaacttccagaccattggcttgagtgcagccgcccgctttaaccagtgcaacacgacacgcggcaacgaggtcatctccgtgatgaatcgggccaagaaagcagggaagtcagtgggagtggtaaccaccacacgagtgcagcacgcctcgccagccggcacctacgcccacacggtgaaccgcaactggtactcggacgccgacgtgcctgcctccgcccgccaggaggggtgccaggacatcgctacgcagctcatctccaacatggacattgacgtgatcctaggtggaggccgaaagtacatgtttcgcatgggaaccccagaccctgagtacccagatgactacagccaaggtgggaccaggctggacgggaagaatctggtgcaggaatggctggcgaagcgccagggtgcccggtatgtgtggaaccgcactgagctcatgcaggcttccctggacccgtctgtgacccatctcatgggtctctttgagcctggagacatgaaatacgagatccaccgagactccacactggacccctccctgatggagatgacagaggctgccctgcgcctgctgagcaggaacccccgcggcttcttcctcttcgtggagggtggtcgcatcgaccatggtcatcatgaaagcagggcttaccgggcactgactgagacgatcatgttcgacgacgccattgagagggcgggccagctcaccagcgaggaggacacgctgagcctcgtcactgccgaccactcccacgtcttctccttcggaggctaccccctgcgagggagctccatcttcgggctggcccctggcaaggcccgggacaggaaggcctacacggtcctcctatacggaaacggtccaggctatgtgctcaaggacggcgcccggccggatgttaccgagagcgagagcgggagccccgagtatcggcagcagtcagcagtgcccctggacgaagagacccacgcaggcgaggacgtggcggtgttcgcgcgcggcccgcaggcgcacctggttcacggcgtgcaggagcagaccttcatagcgcacgtcatggccttcgccgcctgcctggagccctacaccgcctgcgacctggcgccccccgccggcaccaccgacgccgcgcacccggggcggtccgtggtccccgcgttgcttcctctgctggccgggaccctgctgctgctggagacggccactgctccctgagtgtcccgtccctggggctcctgcttccccatcccggagttctcctgctccccacctcctgtcgtcctgcctggcctccagcccgagtcgtcatccccggagtccctatacagaggtcctgccatggaaccttcccctccccgtgcgctctggggactgagcccatgacaccaaacctgccccttggctgctctcggactccctaccccaaccccagggactgcaggttgtgccctgtggctgcctgcaccccaggaaaggagggggctcaggccatccagccaccacctacagcccagtgggtaccaggcaggctcccttcctggggaaaagaagcacccagaccccgcgccccgctgatctttgcttcagtccttgaatcacctgtgggacttgaggactcgggatcttcaggacgcctggagaagggtggtttcctgccaccctgctggccaaggaggctcctggggtggggatcaccagggggattttgacacagccttcggctgccccccactaagctaattccacacccctgtacccccccagggggccctctgcctcatggcaaaggcttgccccaaatctcaacttctcagacgttccatacccccacatgccaatttcagcacccaactgagatccgaggagctcctgggaagccctgggtgcaggacactggtcgagagccaaaggtccctccccagacatctggacactgggcatagatttctcaagaaggaagactcccctgcctccccagggcctctgctctcctgggagacaaagcaataataaaaggaagtgtttgtaatcccagcactttgggaggccgaggtgggcggatcacgaggtcaggagatggagaccatcctggctaacacggtgaaaccccttatctatgcgcctgtagtcccagctacccaggaggctgaagcaggataatcgcttgaacccgggcggcggagattgcagtgagccgaggtcatgccactgcactgcagcctgggcgacagagcgagattctgcctcaaaaataaacaaataaattttaaaaataaataaataataaaaggaagtgttagacaatgtaa

SEQ ID NO: 7 - protein, 535 aa, Homo sapiens
MLGPCMLLLLLLLGLRLQLSLGIIPVEEENPDFWNREAAEALGAAKKLQPAQTAAKNLIIFLGDGMGVSTVTAARILKGQKKDKLGPEIPLAMDRFPYVALSKTYNVDKHVPDSGATATAYLCGVKGNFQTIGLSAAARFNQCNTTRGNEVISVMNRAKKAGKSVGVVTTTRVQHASPAGTYAHTVNRNWYSDADVPASARQEGCQDIATQLISNMDIDVILGGGRKYMFRMGTPDPEYPDDYSQGGTRLDGKNLVQEWLAKRQGARYVWNRTELMQASLDPSVTHLMGLFEPGDMKYEIHRDSTLDPSLMEMTEAALRLLSRNPRGFFLFVEGGRIDHGHHESRAYRALTETIMFDDAIERAGQLTSEEDTLSLVTADHSHVFSFGGYPLRGSSIFGLAPGKARDRKAYTVLLYGNGPGYVLKDGARPDVTESESGSPEYRQQSAVPLDEETHAGEDVAVFARGPQAHLVHGVQEQTFIAHVMAFAACLEPYTACDLAPPAGTTDAAHPGRSVVPALLPLLAGTLLLLETATAP

SEQ ID NO: 8 - DNA, 3241 bp, Homo sapiens
  source 1..3241: mol_type = genomic DNA
cggttcctggtgtccccacttcgcctccctcctgctgcccccaagacatgcaggggccctgggtgctgctgctgctgggcctgaggctacagctctccctgggcgtcatcccagctgaggaggagaacccggccttctggaaccgccaggcagctgaggccctggatgctgccaagaagctgcagcccatccagaaggtcgccaagaacctcatcctcttcctgggcgatgggttgggggtgcccacggtgacagccaccaggatcctaaaggggcagaagaatggcaaactggggcctgagacgcccctggccatggaccgcttcccatacctggctctgtccaagacatacaatgtggacagacaggtgccagacagcgcagccacagccacggcctacctgtgcggggtcaaggccaacttccagaccatcggcttgagtgcagccgcccgctttaaccagtgcaacacgacacgcggcaatgaggtcatctccgtgatgaaccgggccaagcaagcaggaaagtcagtaggagtggtgaccaccacacgggtgcagcacgcctcgccagccggcacctacgcacacacagtgaaccgcaactggtactcagatgctgacatgcctgcctcagcccgccaggaggggtgccaggacatcgccactcagctcatctccaacatggacattgacgtgatccttggcggaggccgcaagtacatgtttcccatggggaccccagaccctgagtacccagctgatgccagccagaatggaatcaggctggacgggaagaacctggtgcaggaatggctggcaaagcaccagggtgcctggtatgtgtggaaccgcactgagctcatgcaggcgtccctggaccagtctgtgacccatctcatgggcctctttgagcccggagacacgaaatatgagatccaccgagaccccacactggacccctccctgatggagatgacagaggctgccctgcgcctgctgagcaggaacccccgcggcttctacctctttgtggagggcggccgcatcgaccatggtcatcatgagggtgtggcttaccaggcactcactgaggcggtcatgttcgacgacgccattgagagggcgggccagctcaccagcgaggaggacacgctgaccctcgtcaccgctgaccactcccatgtcttctcctttggtggctacaccttgcgagggagctccatcttcgggttggcccccagcaaggctcaggacagcaaagcctacacgtccatcctgtacggcaatggcccgggctacgtgttcaactcaggcgtgcgaccagacgtgaatgagagcgagagcgggagccccgattaccagcagcaggcggcggtgcccctgtcgtccgagacccacggaggcgaagacgtggcggtgtttgcgcgcggcccgcaggcgcacctggtgcatggtgtgcaggagcagagcttcgtagcgcatgtcatggccttcgctgcctgtctggagccctacacggcctgcgacctggcgcctcccgcctgcaccaccgacgccgcgcacccagttgccgcgtcgctgccactgctggccgggaccctgctgctgctgggggcgtccgctgctccctgagtgccccactccggagttatcctgctccccacctccgggcgtcctgccctgttccccgtcctgagccgccacttccagcgaacacacacaggtgtcctgccgttggaccttcacctcctagagataaaccagcctcagctggcgcagcggggcccttcttccctccgcatccccttcagggagcaggagcccagggcgccctgggagctgagcctgggacttccaggacctcccctcaggttgttctctgattcttcctcccaaccccagagactgcagatttgtgccatgcggctgcctgcaccccagacaataaagggaccaaaaccacccaacccccaccctgcctctatcctaaggaagaccaagcaggcctggacccagagacgtcccccatcgtgggacacgacacacccagaccgcgtgccccaccgtcttagcttcaatcctggcagcacctggtagacccaaggacttgggtggatcaggacacctgaagaagagaagcttccggcaaccctgcaacccacccaaggaggctactggatcggggattcccaggggggctttgacacagtcctctgctgtctccccactaggatcattccacacccctgcacctgaccaagggaccaatgaggcagaggcttgccccaagtcacagccactcagatgcttcctgccccccagtgcccattccaggtcaccagatccaaggagcgcttgaggagctctgggtacagggcagcaacccagagcccatgggccctcccgggacatctggatgctgggcatagatttctcaacaaggaagactcccctgcctcctcaaggtctccattctcctaggagacaaagcaataataaaaggtgttagacaatgtaatgccagtactacttcctaggagaaaaatcatgagtgagtgtgggcacagtatctggagaggtggataacgcaggccaggaggtactgctgaggggcagatgattgagcaagagacttgaacagagtgggggcttgagcaaggcagcacagcagtgcaaacgccctggggcagtgtcagcaggtgctctgggaggccaagggctggatcagaggggtgggggtgggtgggcagagtggggaaagcctgaggggtcaggagagtggggtgtgcatgggggactgtgaagtctggttagaggggtgtggttggaggtctttgaggagggctgtgacctgccctggttgggaaataagcactctggctgctgccaggagaagggtctggtcttttgggcagagggtgggggtggtggcaggctcaggtgaaagctggggaaggagctgactccaggtgtttctgacctccctctgaaagtattctggagcgcccatcccaatacagccatacttagtgagtacacacctgctccaagagaacattgaaaagaataaaggtgaaatcaaccacattttccagcaaattttgcagtattacaaatttatttgtacatttacaaaggtgcaaaaaagcatcttgcttttgcaagaaatagtaacatcattcaatatgctttcttatttactaaaaccttgaaataaaattgtaaaacatcagtttgaa

SEQ ID NO: 9 - protein, 528 aa, Homo sapiens
MQGPWVLLLLGLRLQLSLGVIPAEEENPAFWNRQAAEALDAAKKLQPIQKVAKNLILFLGDGLGVPTVTATRILKGQKNGKLGPETPLAMDRFPYLALSKTYNVDRQVPDSAATATAYLCGVKANFQTIGLSAAARFNQCNTTRGNEVISVMNRAKQAGKSVGVVTTTRVQHASPAGTYAHTVNRNWYSDADMPASARQEGCQDIATQLISNMDIDVILGGGRKYMFPMGTPDPEYPADASQNGIRLDGKNLVQEWLAKHQGAWYVWNRTELMQASLDQSVTHLMGLFEPGDTKYEIHRDPTLDPSLMEMTEAALRLLSRNPRGFYLFVEGGRIDHGHHEGVAYQALTEAVMFDDAIERAGQLTSEEDTLTLVTADHSHVFSFGGYTLRGSSIFGLAPSKAQDSKAYTSILYGNGPGYVFNSGVRPDVNESESGSPDYQQQAAVPLSSETHGGEDVAVFARGPQAHLVHGVQEQSFVAHVMAFAACLEPYTACDLAPPACTTDAAHPVAASLPLLAGTLLLLGASAAP

SEQ ID NO: 10 - DNA, 2371 bp, Homo sapiens
  source 1..2371: mol_type = genomic DNA
gccgcgttgcgctcccgccactccgcgcccgctatcctggctccgtgctcccacgcgcttgtgcctggacggaccctcgccagtgctctgcgcagagaaagagaaagaccccaagtactggcgagaccaagcgcaagagacactgaaatatgccctggagcttcagaagctcaacaccaacgtggctaagaatgtcatcatgttcctgggagatgggatgggtgtctccacagtgacggctgcccgcatcctcaagggtcagctccaccacaaccctggggaggagaccaggctggagatggacaagttccccttcgtggccctctccaagacgtacaacaccaatgcccaggtccctgacagtgccggcaccgccaccgcctacctgtgtggggtgaaggccaatgagggcaccgtgggggtaagcgcagccactgagcgttcccggtgcaacaccacccaggggaacgaggtcacctccatcctgcgctgggccaaggacgctgggaaatctgtgggcattgtgaccaccacgagagtgaaccatgccacccccagcgccgcctacgcccactcggctgaccgggactggtactcagacaacgagatgccccctgaggccttgagccagggctgtaaggacatcgcctaccagctcatgcataacatcagggacattgacgtgatcatggggggtggccggaaatacatgtaccccaagaataaaactgatgtggagtatgagagtgacgagaaagccaggggcacgaggctggacggcctggacctcgttgacacctggaagagcttcaaaccgagatacaagcactcccacttcatctggaaccgcacggaactcctgacccttgacccccacaatgtggactacctattgggtctcttcgagccaggggacatgcagtacgagctgaacaggaacaacgtgacggacccgtcactctccgagatggtggtggtggccatccagatcctgcggaagaaccccaaaggcttcttcttgctggtggaaggaggcagaattgaccacgggcaccatgaaggaaaagccaagcaggccctgcatgaggcggtggagatggaccgggccatcgggcaggcaggcagcttgacctcctcggaagacactctgaccgtggtcactgcggaccattcccacgtcttcacatttggtggatacaccccccgtggcaactctatctttggtctggcccccatgctgagtgacacagacaagaagcccttcactgccatcctgtatggcaatgggcctggctacaaggtggtgggcggtgaacgagagaatgtctccatggtggactatgctcacaacaactaccaggcgcagtctgctgtgcccctgcgccacgagacccacggcggggaggacgtggccgtcttctccaagggccccatggcgcacctgctgcacggcgtccacgagcagaactacgtcccccacgtgatggcgtatgcagcctgcatcggggccaacctcggccactgtgctcctgccagctcggcaggcagccttgctgcaggccccctgctgctcgcgctggccctctaccccctgagcgtcctgttctgagggcccagggcccgggcacccacaagcccgtgacagatgccaacttcccacacggcagcccccccctcaaggggcagggaggtgggggcctcctcagcctctgcaactgcaagaaaggggacccaagaaaccaaagtctgccgcccacctcgctcccctctggaatcttccccaagggccaaacccacttctggcctccagcctttgctccctccccgctgccctttggccaacagggtagatttctcttgggcaggcagagagtacagactgcagacattctcaaagcctcttatttttctagcgaacgtatttctccagacccagaggccctgaagcctccgtggaacattctggatctgaccctcccagtctcatctcctgaccctcccactcccatctccttacctctggaaccccccaggccctacaatgctcatgtccctgtccccaggcccagccctccttcaggggagttgaggtctttctcctcaggacaaggccttgctcactcactcactccaagaccaccagggtcccaggaagccggtgcctgggtggccatcctacccagcgtggcccaggccgggaagagccacctggcagggctcacactcctgggctctgaacacacacgccagctcctctctgaagcgactctcctgtttggaacggcaaaaaaaaatttttttttctctttttggtggtggttaaaagggaacacaaaacatttaaataaaactttccaaatatttccgagga

SEQ ID NO: 11 - protein, 736 aa, synthetic construct
MAADGYLPDWLEDNLSEGIREWWALKPGAPQPKANQQHQDNARGLVLPGYKYLGPGNGLDKGEPVNAADAAALEHDKAYDQQLKAGDNPYLKYNHADAEFQERLKEDTSFGGNLGRAVFQAKKRLLEPLGLVEEAAKTAPGKKRPVEQSPQEPDSSAGIGKSGAQPAKKRLNFGQTGDTESVPDPQPIGEPPAAPSGVGSLTMASGGGAPVADNNEGADGVGSSSGNWHCDSQWLGDRVITTSTRTWALPTYNNHLYKQISNSTSGGSSNDNAYFGYSTPWGYFDFNRFHCHFSPRDWQRLINNNWGFRPKRLNFKLFNIQVKEVTDNNGVKTIANNLTSTVQVFTDSDYQLPYVLGSAHEGCLPPFPADVFMIPQYGYLTLNDGSQAVGRSSFYCLEYFPSQMLRTGNNFQFSYEFENVPFHSSYAHSQSLDRLMNPLIDQYLYYLSRTINGSGQNQQTLKFSVAGPSNMAVQGRNYIPGPSYRQQRVSTTVTQNNNSEFAWPGASSWALNGRNSLMNPGPAMASHKEGEDRFFPLSGSLIFGKQGTGRDNVDADKVMITNEEEIKTTNPVATESYGQVATNHQSAQAQAQTGWVQNQGILPGMVWQDRDVYLQGPIWAKIPHTDGNFHPSPLMGGFGMKHPPPQILIKNTPVPADPPTAFNKDKLNSFITQYSTGQVSVEIEWELQKENSKRWNPEIQYTSNYYKSNNVEFAVNTEGVYSEPRPIGTRYLTRNL

SEQ ID NO: 12 - protein, 469 aa, Homo sapiens
MFLGDGMGVSTVTAARILKGQLHHNPGEETRLEMDKFPFVALSKTYNTNAQVPDSAGTATAYLCGVKANEGTVGVSAATERSRCNTTQGNEVTSILRWAKDAGKSVGIVTTTRVNHATPSAAYAHSADRDWYSDNEMPPEALSQGCKDIAYQLMHNIRDIDVIMGGGRKYMYPKNKTDVEYESDEKARGTRLDGLDLVDTWKSFKPRYKHSHFIWNRTELLTLDPHNVDYLLGLFEPGDMQYELNRNNVTDPSLSEMVVVAIQILRKNPKGFFLLVEGGRIDHGHHEGKAKQALHEAVEMDRAIGQAGSLTSSEDTLTVVTADHSHVFTFGGYTPRGNSIFGLAPMLSDTDKKPFTAILYGNGPGYKVVGGERENVSMVDYAHNNYQAQSAVPLRHETHGGEDVAVFSKGPMAHLLHGVHEQNYVPHVMAYAACIGANLGHCAPASSAGSLAAGPLLLALALYPLSVLF

SEQ ID NO: 13 - DNA, 2549 bp, Mus musculus
  source 1..2549: mol_type = genomic DNA
ctagtgggtttgtgtgacaatcacatctgaaggctctcttcactccaagatggccctcctgtcgcccactctggacttggtggtcacagcagttggtagcttccttctgttcgtgctggccctgggcctgctctgtttcttcacctgtcgcctggccaggccactcaggatcggaacgtcaattaacgtcaattaacatctgacgctgcccccccccccctcttcccaccatctgggctccagcgagggacgaatctcagggtacaccatgatctcaccatttttagtactggccatcggcacctgccttaccaactcttttgtgccagagaaagagagagaccccagttactggcgacagcaagcccaagagaccttgaaaaatgccctgaaactccaaaagctcaacaccaatgtagccaagaatgtcatcatgttcctgggagatggtatgggcgtctccacagtaaccgctgcccgaatccttaagggccagctacaccacaacacgggcgaggagacccggctggagatggacaaattcccctttgtggccctctccaagacatataacaccaacgctcaggtccctgacagcgcgggcactgccactgcctacttgtgtggcgtgaaggccaacgagggcacagtgggagtgagcgcagccacagagcgcacgcgatgcaacaccactcagggcaatgaggtcacatccatcctgcgctgggccaaggatgctgggaagtccgtgggcattgtgactaccactcgggtgaaccacgccacacccagtgcagcctacgcacactcggccgatcgggactggtactcggataacgagatgccaccagaggctctgagccagggctgcaaggacatcgcatatcagctaatgcacaatatcaaggatatcgacgtgatcatgggtggcggccggaaatacatgtacccgaagaacagaactgatgtggaatacgaactggatgagaaggccaggggtacaaggctagatggcctggatctcatcagtatttggaagagctttaaacccagacacaagcattcccactatgtctggaaccgcactgaactgctggcccttgacccctccagggtggactacctcttaggtctctttgagcccggggacatgcagtatgaattgaatcggaacaacctgactgacccttcgctctccgagatggtggaggtggccctccggatcctgaccaaaaacctcaaaggcttcttcttgctggtggaaggaggcaggattgaccacggacatcatgagggtaaggccaagcaggctctgcatgaagcagtggagatggaccaggccattggcaaggcaggcgccatgacatcccagaaagacaccttgactgtggttactgctgatcattcccacgttttcacattcggtggatacaccccccggggcaactccatctttggtctggctcccatggtgagcgacacggacaagaagcccttcacggccatcctatatggtaacgggcctggctacaaggtggtggacggtgaacgggaaaatgtctccatggtagattacgctcacaacaactaccaggcccagtccgctgttcccctgcgccatgagacccacggtggagaagacgtggcggtctttgccaagggcccgatggcacacctgcttcacggcgtccatgagcagaactacattccccatgtgatggcgtatgcctcctgcattggggccaaccttgaccactgtgcctgggccggctctgggagcgcaccctccccaggggccctgctgcttccactggctgtgctctccctacgcaccctgttctgagggtgcaggtcccacaagcccgcaatggacagccagctcccctccttttgtggcccaccaccgggcagcccacactcaagggagaggtccaggcaacttccagcaggaacagaagttcgctatctgccttgcctgtatctggaatcctccatgggccagattcctggctctgcctttattccctagttattgccctttggccagcaggtttctctcttgggcaggcaagacacagactgcacagattcccaaagcaccttatttttctaccaaatatattctccagaccctgcaacctccatggaacattccagatctgaccttctctcctccatcccttcccttccctctggaacactgggccccatagtcacggccagtcctcaagcccaaccctccctggggggaagaccaggtctgctcaggatgagactcccaggaagccacctccggggttggctgtctacccagggttgccaagctgggaagaacactccagccggacaggacacacacacacactccccacccaattgcagagactcgccaacccttcactgaagtggctctcctgtttggaatagcggggtggggtgggggagaagaaagaaagaaagaaaaaaaatttttaatttctctttttggtgttggttaaaagggaacacaagacatttaaataaaacatcccaaatatttctgaggccag

SEQ ID NO: 14 - protein, 524 aa, Mus musculus
MISPFLVLAIGTCLTNSFVPEKERDPSYWRQQAQETLKNALKLQKLNTNVAKNVIMFLGDGMGVSTVTAARILKGQLHHNTGEETRLEMDKFPFVALSKTYNTNAQVPDSAGTATAYLCGVKANEGTVGVSAATERTRCNTTQGNEVTSILRWAKDAGKSVGIVTTTRVNHATPSAAYAHSADRDWYSDNEMPPEALSQGCKDIAYQLMHNIKDIDVIMGGGRKYMYPKNRTDVEYELDEKARGTRLDGLDLISIWKSFKPRHKHSHYVWNRTELLALDPSRVDYLLGLFEPGDMQYELNRNNLTDPSLSEMVEVALRILTKNLKGFFLLVEGGRIDHGHHEGKAKQALHEAVEMDQAIGKAGAMTSQKDTLTVVTADHSHVFTFGGYTPRGNSIFGLAPMVSDTDKKPFTAILYGNGPGYKVVDGERENVSMVDYAHNNYQAQSAVPLRHETHGGEDVAVFAKGPMAHLLHGVHEQNYIPHVMAYASCIGANLDHCAWAGSGSAPSPGALLLPLAVLSLRTLF

SEQ ID NO: 15 - DNA, 2525 bp, Macaca fascicularis
  source 1..2525: mol_type = genomic DNA
gcgttgcgctcccgccactccgcgcccgcgatcccggctctgcgctcccacgcgcttgtgcctggacggaccctcgtcagtgctctgcgcaggattggaacatcagttaacatctgaccactgccagcccaccccctcccacccgcgtcgatcgcatctctgggcttcagggataaagcaggtcttggggtgcaccatgatttcaccattcttagtactggccattggcacctgccttaccaactccttagtgccagagaaagagaaagaccccaagtactggcgagaccaagcgcaagagacactgaaatatgccctggagcttcagaagctcaacaccaatgtggctaagaatgtcatcatgttcctgggagatgggatgggcgtctccacagtgacggccacccgcatcctcaagggtcagctccaccacaaccctggggaggagaccaggctggagatggacaagttccccttcgtggccctctccaagacgtacaacaccaatgcccaggtccctgacagtgccggcaccgccaccgcctacctgtgtggggtgaaggccaacgagggcaccgtgggggtaagcgcagccaccgagcgttcccggtgcaacaccacccaggggaacgaggtcacctccatcctgcgctgggccaaggacgctgggaaatctgtgggcattgtaaccaccacaagagtgaaccatgccacccccagcgccgcctatgcccactcagctgaccgggactggtactcagacaacgagatgccccctgaggccttgagccagggctgcaaggacatcgcctaccagcttgtgcataacatcagggacattgacgtgatcatggggggtggccggaaatacatgtaccccaagaataaaactgatgtggagtatgagattgacgagaaagccaggggcacgaggctggacggcctggacctcgttaacatctggaagagcttcaaaccgagacacaagcactcccacttcatctggaaccgcacggaactcctgacccttgacccccacaatgtggactacctattgggtctctttgagccgggggacatggagtacgagctgaacaggaacaacgtgacggacccgtcactctccgagatggtggtggtggccatccagatcctgcggaagaaccccaaaggcttcttcttgctggtggaaggaggcaggatcgaccacgggcaccatgaaggcaaagccaagcaggccctgcacgaggcggtagagatggaccgggccatcgggcaggcaggcagcatgacctccttggaagacactctgaccgtggtcaccgcggaccattcccacgtcttcacctttggtggatacaccccccgtggcaactctatctttggtctggcccccatgctgagtgacacagacaagaagcccttcactgccatcctgtatggcaatgggcctggctacaaggtggtgggcggtgaacgagagaatgtctccatggtggactatgctcacaacaactaccaggcgcagtctgctgtgcccctgcgccacgagacccacggcggggaggatgtggccgtcttctccaagggccccatggcacacctgctgcacggcgtccatgagcagaactacatcccccacgtgatggcgtacgcagcctgcatcggggccaacctcgaccactgtgcccctgccagctcggcaggcagccttgctgcaggccccctgctgctccccctggccctcttccccctgagcatcctgttctgagggcccagggcccgggcacccacgagcccgtgacacgccaacttcccactccccagtgctgcccaccgcccggcagcccaccccgcaaggggcagggaggtgggggcctcctcagcctctgcaactgcgagaaaggggacccaggaaaccaaagtctgccgcccacctcgctcccctctggaatcttccccgagggccaaacccacttctggcctccagcctttgctccctccccgctgccctttggccaacagggtagatttctcttgggcaagcagagagtacagactgcagaaattctcaaagcctcttatttttctagcaaacatatttctccagacccagaggccctgaagcctccatggaacattccggatctgaccctcccactctcatctccttccctctagaaccccccaggccctaccatgctcatgtccctgtcctcaggcccagcccttcttcaggggagatgaggtctttctcctcaggacaaggcctcgctcactcactccaaggccaccggggtcccaggaagctggtgcctgggtggccatcctacccggcgtggcccaggccaggaagagccacctggcagggctcacactcctgggctctgaacacgcatgccagctcctctctgaagcgattctcccatttggaacggcaaaaaaaaatttttttctctttttggtggtggttaaaagggaacacaaaacatttaaataaaactttccaaatatttctgaggaca

SEQ ID NO: 16 - protein, 524 aa, Macaca fascicularis
MISPFLVLAIGTCLTNSLVPEKEKDPKYWRDQAQETLKYALELQKLNTNVAKNVIMFLGDGMGVSTVTATRILKGQLHHNPGEETRLEMDKFPFVALSKTYNTNAQVPDSAGTATAYLCGVKANEGTVGVSAATERSRCNTTQGNEVTSILRWAKDAGKSVGIVTTTRVNHATPSAAYAHSADRDWYSDNEMPPEALSQGCKDIAYQLVHNIRDIDVIMGGGRKYMYPKNKTDVEYEIDEKARGTRLDGLDLVNIWKSFKPRHKHSHFIWNRTELLTLDPHNVDYLLGLFEPGDMEYELNRNNVTDPSLSEMVVVAIQILRKNPKGFFLLVEGGRIDHGHHEGKAKQALHEAVEMDRAIGQAGSMTSLEDTLTVVTADHSHVFTFGGYTPRGNSIFGLAPMLSDTDKKPFTAILYGNGPGYKVVGGERENVSMVDYAHNNYQAQSAVPLRHETHGGEDVAVFSKGPMAHLLHGVHEQNYIPHVMAYAACIGANLDHCAPASSAGSLAAGPLLLPLALFPLSILF

SEQ ID NO: 17 - DNA, 2606 bp, Homo sapiens
  source 1..2606: mol_type = genomic DNA
ccgggcctcactcgggccccgcggccgcctttataaggcggcgggggtggtggcccgggccgcgttgcgctcccgccactccgcgcccgctatcctggctccgtgctcccacgcgcttgtgcctggacggaccctcgccagtgctctgcgcaggattggaacatcagttaacatctgaccactgccagcccaccccctcccacccacgtcgattgcatctctgggctccagggataaagcaggtcttggggtgcaccatgatttcaccattcttagtactggccattggcacctgccttactaactccttagtgccagagaaagagaaagaccccaagtactggcgagaccaagcgcaagagacactgaaatatgccctggagcttcagaagctcaacaccaacgtggctaagaatgtcatcatgttcctgggagatgggatgggtgtctccacagtgacggctgcccgcatcctcaagggtcagctccaccacaaccctggggaggagaccaggctggagatggacaagttccccttcgtggccctctccaagacgtacaacaccaatgcccaggtccctgacagcgccggcaccgccaccgcctacctgtgtggggtgaaggccaatgagggcaccgtgggggtaagcgcagccactgagcgttcccggtgcaacaccacccaggggaacgaggtcacctccatcctgcgctgggccaaggacgctgggaaatctgtgggcattgtgaccaccacgagagtgaaccatgccacccccagcgccgcctacgcccactcggctgaccgggactggtactcagacaacgagatgccccctgaggccttgagccagggctgtaaggacatcgcctaccagctcatgcataacatcagggacattgacgtgatcatggggggtggccggaaatacatgtaccccaagaataaaactgatgtggagtatgagagtgacgagaaagccaggggcacgaggctggacggcctggacctcgttgacacctggaagagcttcaaaccgagatacaagcactcccacttcatctggaaccgcacggaactcctgacccttgacccccacaatgtggactacctattgggtctcttcgagccaggggacatgcagtacgagctgaacaggaacaacgtgacggacccgtcactctccgagatggtggtggtggccatccagatcctgcggaagaaccccaaaggcttcttcttgctggtggaaggaggcagaattgaccacgggcaccatgaaggaaaagccaagcaggccctgcatgaggcggtggagatggaccgggccatcgggcaggcaggcagcttgacctcctcggaagacactctgaccgtggtcactgcggaccattcccacgtcttcacatttggtggatacaccccccgtggcaactctatctttggtctggcccccatgctgagtgacacagacaagaagcccttcactgccatcctgtatggcaatgggcctggctacaaggtggtgggcggtgaacgagagaatgtctccatggtggactatgctcacaacaactaccaggcgcagtctgctgtgcccctgcgccacgagacccacggcggggaggacgtggccgtcttctccaagggccccatggcgcacctgctgcacggcgtccacgagcagaactacgtcccccacgtgatggcgtatgcagcctgcatcggggccaacctcggccactgtgctcctgccagctcggcaggcagccttgctgcaggccccctgctgctcgcgctggccctctaccccctgagcgtcctgttctgagggcccagggcccgggcacccacaagcccgtgacagatgccaacttcccacacggcagcccccccctcaaggggcagggaggtgggggcctcctcagcctctgcaactgcaagaaaggggacccaagaaaccaaagtctgccgcccacctcgctcccctctggaatcttccccaagggccaaacccacttctggcctccagcctttgctccctccccgctgccctttggccaacagggtagatttctcttgggcaggcagagagtacagactgcagacattctcaaagcctcttatttttctagcgaacgtatttctccagacccagaggccctgaagcctccgtggaacattctggatctgaccctcccagtctcatctcctgaccctcccactcccatctccttacctctggaaccccccaggccctacaatgctcatgtccctgtccccaggcccagccctccttcaggggagttgaggtctttctcctcaggacaaggccttgctcactcactcactccaagaccaccagggtcccaggaagccggtgcctgggtggccatcctacccagcgtggcccaggccgggaagagccacctggcagggctcacactcctgggctctgaacacacacgccagctcctctctgaagcgactctcctgtttggaacggcaaaaaaaaatttttttttctctttttggtggtggttaaaagggaacacaaaacatttaaataaaactttccaaatatttccgaggacaaaaaaaaaaa

SEQ ID NO: 18 - protein, 524 aa, Homo sapiens
MISPFLVLAIGTCLTNSLVPEKEKDPKYWRDQAQETLKYALELQKLNTNVAKNVIMFLGDGMGVSTVTAARILKGQLHHNPGEETRLEMDKFPFVALSKTYNTNAQVPDSAGTATAYLCGVKANEGTVGVSAATERSRCNTTQGNEVTSILRWAKDAGKSVGIVTTTRVNHATPSAAYAHSADRDWYSDNEMPPEALSQGCKDIAYQLMHNIRDIDVIMGGGRKYMYPKNKTDVEYESDEKARGTRLDGLDLVDTWKSFKPRYKHSHFIWNRTELLTLDPHNVDYLLGLFEPGDMQYELNRNNVTDPSLSEMVVVAIQILRKNPKGFFLLVEGGRIDHGHHEGKAKQALHEAVEMDRAIGQAGSLTSSEDTLTVVTADHSHVFTFGGYTPRGNSIFGLAPMLSDTDKKPFTAILYGNGPGYKVVGGERENVSMVDYAHNNYQAQSAVPLRHETHGGEDVAVFSKGPMAHLLHGVHEQNYVPHVMAYAACIGANLGHCAPASSAGSLAAGPLLLALALYPLSVLF

SEQ ID NO: 19 - protein, 30 aa, synthetic construct
GSGSLYYLSKTINGHDSPHKSGQNQQTLKF

SEQ ID NO: 20 - protein, 50 aa, synthetic construct
GSGSRLMNPLIDQYLYYLSKTINGHDSPHKSGQNQQTLKFSVAGPSNMAV

SEQ ID NO: 21 - protein, 15 aa, synthetic construct
LKFSVAGPSNMAVQG

SEQ ID NO: 22-35 - skipped (14 entries)

SEQ ID NO: 36 - protein, 742 aa, synthetic construct
MAADGYLPDWLEDNLSEGIREWWALKPGAPQPKANQQHQDNARGLVLPGYKYLGPGNGLDKGEPVNAADAAALEHDKAYDQQLKAGDNPYLKYNHADAEFQERLKEDTSFGGNLGRAVFQAKKRLLEPLGLVEEAAKTAPGKKRPVEQSPQEPDSSAGIGKSGAQPAKKRLNFGQTGDTESVPDPQPIGEPPAAPSGVGSLTMASGGGAPVADNNEGADGVGSSSGNWHCDSQWLGDRVITTSTRTWALPTYNNHLYKQISNSTSGGSSNDNAYFGYSTPWGYFDFNRFHCHFSPRDWQRLINNNWGFRPKRLNFKLFNIQVKEVTDNNGVKTIANNLTSTVQVFTDSDYQLPYVLGSAHEGCLPPFPADVFMIPQYGYLTLNDGSQAVGRSSFYCLEYFPSQMLRTGNNFQFSYEFENVPFHSSYAHSQSLDRLMNPLIDQYLYYLSKTERVSGSPHSKAQNQQTLKFSVAGPSNMAVQGRNYIPGPSYRQQRVSTTVTQNNNSEFAWPGASSWALNGRNSLMNPGPAMASHKEGEDRFFPLSGSLIFGKQGTGRDNVDADKVMITNEEEIKTTNPVATESYGQVATNHQSAQAQAQTGWVQNQGILPGMVWQDRDVYLQGPIWAKIPHTDGNFHPSPLMGGFGMKHPPPQILIKNTPVPADPPTAFNKDKLNSFITQYSTGQVSVEIEWELQKENSKRWNPEIQYTSNYYKSNNVEFAVNTEGVYSEPRPIGTRYLTRNL

SEQ ID NO: 37 - protein, 742 aa, synthetic construct
MAADGYLPDWLEDNLSEGIREWWALKPGAPQPKANQQHQDNARGLVLPGYKYLGPGNGLDKGEPVNAADAAALEHDKAYDQQLKAGDNPYLKYNHADAEFQERLKEDTSFGGNLGRAVFQAKKRLLEPLGLVEEAAKTAPGKKRPVEQSPQEPDSSAGIGKSGAQPAKKRLNFGQTGDTESVPDPQPIGEPPAAPSGVGSLTMASGGGAPVADNNEGADGVGSSSGNWHCDSQWLGDRVITTSTRTWALPTYNNHLYKQISNSTSGGSSNDNAYFGYSTPWGYFDFNRFHCHFSPRDWQRLINNNWGFRPKRLNFKLFNIQVKEVTDNNGVKTIANNLTSTVQVFTDSDYQLPYVLGSAHEGCLPPFPADVFMIPQYGYLTLNDGSQAVGRSSFYCLEYFPSQMLRTGNNFQFSYEFENVPFHSSYAHSQSLDRLMNPLIDQYLYYLSKAEIGHDSPHKSGQNQQTLKFSVAGPSNMAVQGRNYIPGPSYRQQRVSTTVTQNNNSEFAWPGASSWALNGRNSLMNPGPAMASHKEGEDRFFPLSGSLIFGKQGTGRDNVDADKVMITNEEEIKTTNPVATESYGQVATNHQSAQAQAQTGWVQNQGILPGMVWQDRDVYLQGPIWAKIPHTDGNFHPSPLMGGFGMKHPPPQILIKNTPVPADPPTAFNKDKLNSLITQYSTGQVSVEIEWELQKENSKRWNPEIQYTSNYYKSNNVEFAVNTEGVYSEPRPIGTRYLTRNL

SEQ ID NO: 38 - protein, 742 aa, synthetic construct
MAADGYLPDWLEDNLSEGIREWWALKPGAPQPKANQQHQDNARGLVLPGYKYLGPGNGLDKGEPVNAADAAALEHDKAYDQQLKAGDNPYLKYNHADAEFQERLKEDTSFGGNLGRAVFQAKKRLLEPLGLVEEAAKTAPGKKRPVEQSPQEPDSSAGIGKSGAQPAKKRLNFGQTGDTESVPDPQPIGEPPAAPSGVGSLTMASGGGAPVADNNEGADGVGSSSGNWHCDSQWLGDRVITTSTRTWALPTYNNHLYKQISNSTSGGSSNDNAYFGYSTPWGYFDFNRFHCHFSPRDWQRLINNNWGFRPKRLNFKLFNIQVKEVTDNNGVKTIANNLTSTVQVFTDSDYQLPYVLGSAHEGCLPPFPADVFMIPQYGYLTLNDGSQAVGRSSFYCLEYFPSQMLRTGNNFQFSYEFENVPFHSSYAHSQSLDRLMNPLIDQYLYYLSKTIIGSGSPHSKAQNRHTLKFSVAGPSNMAVQGRNYIPGPSYRQQRVSTTVTQNNNSEFAWPGASSWALNGRNSLMNPGPAMASHKEGEDRFFPLSGSLIFGKQGTGRDNVDADKVMITNEEEIKTTNPVATESYGQVATNHQSAQAQAQTGWVQNQGILPGMVWQDRDVYLQGPIWAKIPHTDGNFHPSPLMGGFGMKHPPPQILIKNTPVPADPPTAFNKDKLNSFITQYSTGQVSVEIEWELQKENSKRWNPEIQYTSNYYKSNNVEFAVNTEGVYSEPRPIGTRYLTRNL

SEQ ID NO: 39 - protein, 742 aa, synthetic construct
MAADGYLPDWLEDNLSEGIREWWALKPGAPQPKANQQHQDNARGLVLPGYKYLGPGNGLDKGEPVNAADAAALEHDKAYDQQLKAGDNPYLKYNHADAEFQERLKEDTSFGGNLGRAVFQAKKRLLEPLGLVEEAAKTAPGKKRPVEQSPQEPDSSAGIGKSGAQPAKKRLNFGQTGDTESVPDPQPIGEPPAAPSGVGSLTMASGGGAPVADNNEGADGVGSSSGNWHCDSQWLGDRVITTSTRTWALPTYNNHLYKQISNSTSGGSSNDNAYFGYSTPWGYFDFNRFHCHFSPRDWQRLINNNWGFRPKRLNFKLFNIQVKEVTDNNGVKTIANNLTSTVQVFTDSDYQLPYVLGSAHEGCLPPFPADVFMIPQYGYLTLNDGSQAVGRSSFYCLEYFPSQMLRTGNNFQFSYEFENVPFHSSYAHSQSLDRLMNPLIDQYLYYLSKTEKMSGSPHSKAQNQQTLKFSVAGPSNMAVQGRNYIPGPSYRQQRVSTTVTQNNNSEFAWPGASSWALNGRNSLMNPGPAMASHKEGEDRFFPLSGSLIFGKQGTGRDNVDADKVMITNEEEIKTTNPVATESYGQVATNHQSAQAQAQTGWVQNQGILPGMVWQDRDVYLQGPIWAKIPHTDGNFHPSPLMGGFGMKHPPPQILIKNTPVPADPPTAFNKDKLNSFITQYSTGQVSVEIEWELQKENSKRWNPEIQYTSNYYKSNNVEFAVNTEGVYSEPRPIGTRYLTRNL

SEQ ID NO: 40 - protein, 742 aa, synthetic construct
MAADGYLPDWLEDNLSEGIREWWALKPGAPQPKANQQHQDNARGLVLPGYKYLGPGNGLDKGEPVNAADAAALEHDKAYDQQLKAGDNPYLKYNHADAEFQERLKEDTSFGGNLGRAVFQAKKRLLEPLGLVEEAAKTAPGKKRPVEQSPQEPDSSAGIGKSGAQPAKKRLNFGQTGDTESVPDPQPIGEPPAAPSGVGSLTMASGGGAPVADNNEGADGVGSSSGNWHCDSQWLGDRVITTSTRTWALPTYNNHLYKQISNSTSGGSSNDNAYFGYSTPWGYFDFNRFHCHFSPRDWQRLINNNWGFRPKRLNFKLFNIQVKEVTDNNGVKTIANNLTSTVQVFTDSDYQLPYVLGSAHEGCLPPFPADVFMIPQYGYLTLNDGSQAVGRSSFYCLEYFPSQMLRTGNNFQFSYEFENVPFHSSYAHSQSLDRLMNPLIDQYLYYLSKEINGRGSPHSKAQNQQTLKFSVAGPSNMAVQGRNYIPGPSYRQQRVSTTVTQNNNSEFAWPGASSWALNGRNSLMNPGPAMASHKEGEDRFFPLSGSLIFGKQGTGRDNVDADKVMITNEEEIKTTNPVATESYGQVATNHQSAQAQAQTGWVQNQGILPGMVWQDRDVYLQGPIWAKIPHTDGNFHPSPLMGGFGMKHPPPQILIKNTPVPADPPTAFNKDKLNSFITQYSTGQVSVEIEWELQKENSKRWNPEIQYTSNYYKSNNVEFAVNTEGVYSEPRPIGTRYLTRNL

SEQ ID NO: 41 - protein, 742 aa, synthetic construct
MAADGYLPDWLEDNLSEGIREWWALKPGAPQPKANQQHQDNARGLVLPGYKYLGPGNGLDKGEPVNAADAAALEHDKAYDQQLKAGDNPYLKYNHADAEFQERLKEDTSFGGNLGRAVFQAKKRLLEPLGLVEEAAKTAPGKKRPVEQSPQEPDSSAGIGKSGAQPAKKRLNFGQTGDTESVPDPQPIGEPPAAPSGVGSLTMASGGGAPVADNNEGADGVGSSSGNWHCDSQWLGDRVITTSTRTWALPTYNNHLYKQISNSTSGGSSNDNAYFGYSTPWGYFDFNRFHCHFSPRDWQRLINNNWGFRPKRLNFKLFNIQVKEVTDNNGVKTIANNLTSTVQVFTDSDYQLPYVLGSAHEGCLPPFPADVFMIPQYGYLTLNDGSQAVGRSSFYCLEYFPSQMLRTGNNFQFSYEFENVPFHSSYAHSQSLDRLMNPLIDQYLYYLSKTFNGSGSPHSKAPNLQTLKFSVAGPSNMAVQGRNYIPGPSYRQQRVSTTVTQNNNSEFAWPGASSWALNGRNSLMNPGPAMASHKEGEDRFFPLSGSLIFGKQGTGRDNVDADKVMITNEEEIKTTNPVATESYGQVATNHQSAQAQAQTGWVQNQGILPGMVWQDRDVYLQGPIWAKIPHTDGNFHPSPLMGGFGMKHPPPQILIKNTPVPADPPTAFNKDKLNSFITQYSTGQVSVEIEWELQKENSKRWNPEIQYTSNYYKSNNVEFAVNTEGVYSEPRPIGTRYLTRNL

SEQ ID NO: 42 - protein, 742 aa, synthetic construct
MAADGYLPDWLEDNLSEGIREWWALKPGAPQPKANQQHQDNARGLVLPGYKYLGPGNGLDKGEPVNAADAAALEHDKAYDQQLKAGDNPYLKYNHADAEFQERLKEDTSFGGNLGRAVFQAKKRLLEPLGLVEEAAKTAPGKKRPVEQSPQEPDSSAGIGKSGAQPAKKRLNFGQTGDTESVPDPQPIGEPPAAPSGVGSLTMASGGGAPVADNNEGADGVGSSSGNWHCDSQWLGDRVITTSTRTWALPTYNNHLYKQISNSTSGGSSNDNAYFGYSTPWGYFDFNRFHCHFSPRDWQRLINNNWGFRPKRLNFKLFNIQVKEVTDNNGVKTIANNLTSTVQVFTDSDYQLPYVLGSAHEGCLPPFPADVFMIPQYGYLTLNDGSQAVGRSSFYCLEYFPSQMLRTGNNFQFSYEFENVPFHSSYAHSQSLDRLMNPLIDQYLYYLSKTEKTSGSPHSKAQNQQTLKFSVAGPSNMAVQGRNYIPGPSYRQQRVSTTVTQNNNSEFAWPGASSWALNGRNSLMNPGPAMASHKEGEDRFFPLSGSLIFGKQGTGRDNVDADKVMITNEEEIKTTNPVATESYGQVATNHQSAQAQAQTGWVQNQGILPGMVWQDRDVYLQGPIWAKIPHTDGNFHPSPLMGGFGMKHPPPQILIKNTPVPADPPTAFNKDKLNSFITQYSTGQVSVEIEWELQKENSKRWNPEIQYTSNYYKSNNVEFAVNTEGVYSEPRPIGTRYLTRNL

SEQ ID NO: 43 - protein, 742 aa, synthetic construct
MAADGYLPDWLEDNLSEGIREWWALKPGAPQPKANQQHQDNARGLVLPGYKYLGPGNGLDKGEPVNAADAAALEHDKAYDQQLKAGDNPYLKYNHADAEFQERLKEDTSFGGNLGRAVFQAKKRLLEPLGLVEEAAKTAPGKKRPVEQSPQEPDSSAGIGKSGAQPAKKRLNFGQTGDTESVPDPQPIGEPPAAPSGVGSLTMASGGGAPVADNNEGADGVGSSSGNWHCDSQWLGDRVITTSTRTWALPTYNNHLYKQISNSTSGGSSNDNAYFGYSTPWGYFDFNRFHCHFSPRDWQRLINNNWGFRPKRLNFKLFNIQVKEVTDNNGVKTIANNLTSTVQVFTDSDYQLPYVLGSAHEGCLPPFPADVFMIPQYGYLTLNDGSQAVGRSSFYCLEYFPSQMLRTGNNFQFSYEFENVPFHSSYAHSQSLDRLMNPLIDQYLYYLSKTMNGHDSPHSKAQNQQTLKFSVAGPSNMAVQGRNYIPGPSYRQQRVSTTVTQNNNSEFAWPGASSWALNGRNSLMNPGPAMASHKEGEDRFFPLSGSLIFGKQGTGRDNVDADKVMITNEEEIKTTNPVATESYGQVATNHQSAQAQAQTGWVQNQGILPGMVWQDRDVYLQGPIWAKIPHTDGNFHPSPLMGGFGMKHPPPQILIKNTPVPADPPTAFNKDKLNSFITQYSTGQVSVEIEWELQKENSKRWNPEIQYTSNYYKSNNVEFAVNTEGVYSEPRPIGTRYLTRNL

SEQ ID NO: 44 - protein, 742 aa, synthetic construct
MAADGYLPDWLEDNLSEGIREWWALKPGAPQPKANQQHQDNARGLVLPGYKYLGPGNGLDKGEPVNAADAAALEHDKAYDQQLKAGDNPYLKYNHADAEFQERLKEDTSFGGNLGRAVFQAKKRLLEPLGLVEEAAKTAPGKKRPVEQSPQEPDSSAGIGKSGAQPAKKRLNFGQTGDTESVPDPQPIGEPPAAPSGVGSLTMASGGGAPVADNNEGADGVGSSSGNWHCDSQWLGDRVITTSTRTWALPTYNNHLYKQISNSTSGGSSNDNAYFGYSTPWGYFDFNRFHCHFSPRDWQRLINNNWGFRPKRLNFKLFNIQVKEVTDNNGVKTIANNLTSTVQVFTDSDYQLPYVLGSAHEGCLPPFPADVFMIPQYGYLTLNDGSQAVGRSSFYCLEYFPSQMLRTGNNFQFSYEFENVPFHSSYAHSQSLDRLMNPLIDQYLYYLSKTIDGHDSPHSKAQNQQTLKFSVAGPSNMAVQGRNYIPGPSYRQQRVSTTVTQNNNSEFAWPGASSWALNGRNSLMNPGPAMASHKEGEDRFFPLSGSLIFGKQGTGRDNVDADKVMITNEEEIKTTNPVATESYGQVATNHQSAQAQAQTGWVQNQGILPGMVWQDRDVYLQGPIWAKIPHTDGNFHPSPLMGGFGMKHPPPQILIKNTPVPADPPTAFNKDKLNSFITQYSTGQVSVEIEWELQKENSKRWNPEIQYTSNYYKSNNVEFAVNTEGVYSEPRPIGTRYLTRNL

SEQ ID NO: 45 - protein, 742 aa, synthetic construct
MAADGYLPDWLEDNLSEGIREWWALKPGAPQPKANQQHQDNARGLVLPGYKYLGPGNGLDKGEPVNAADAAALEHDKAYDQQLKAGDNPYLKYNHADAEFQERLKEDTSFGGNLGRAVFQAKKRLLEPLGLVEEAAKTAPGKKRPVEQSPQEPDSSAGIGKSGAQPAKKRLNFGQTGDTESVPDPQPIGEPPAAPSGVGSLTMASGGGAPVADNNEGADGVGSSSGNWHCDSQWLGDRVITTSTRTWALPTYNNHLYKQISNSTSGGSSNDNAYFGYSTPWGYFDFNRFHCHFSPRDWQRLINNNWGFRPKRLNFKLFNIQVKEVTDNNGVKTIANNLTSTVQVFTDSDYQLPYVLGSAHEGCLPPFPADVFMIPQYGYLTLNDGSQAVGRSSFYCLEYFPSQMLRTGNNFQFSYEFENVPFHSSYAHSQSLDRLMNPLIDQYLYYLSKTNNGHDSPHSKAQNQQTLKFSVAGPSNMAVQGRNYIPGPSYRQQRVSTTVTQNNNSEFAWPGASSWALNGRNSLMNPGPAMASHKEGEDRFFPLSGSLIFGKQGTGRDNVDADKVMITNEEEIKTTNPVATESYGQVATNHQSAQAQAQTGWVQNQGILPGMVWQDRDVYLQGPIWAKIPHTDGNFHPSPLMGGFGMKHPPPQILIKNTPVPADPPTAFNKDKLNSFITQYSTGQVSVEIEWELQKENSKRWNPEIQYTSNYYKSNNVEFAVNTEGVYSEPRPIGTRYLTRNL

SEQ ID NO: 46 - protein, 742 aa, synthetic construct
MAADGYLPDWLEDNLSEGIREWWALKPGAPQPKANQQHQDNARGLVLPGYKYLGPGNGLDKGEPVNAADAAALEHDKAYDQQLKAGDNPYLKYNHADAEFQERLKEDTSFGGNLGRAVFQAKKRLLEPLGLVEEAAKTAPGKKRPVEQSPQEPDSSAGIGKSGAQPAKKRLNFGQTGDTESVPDPQPIGEPPAAPSGVGSLTMASGGGAPVADNNEGADGVGSSSGNWHCDSQWLGDRVITTSTRTWALPTYNNHLYKQISNSTSGGSSNDNAYFGYSTPWGYFDFNRFHCHFSPRDWQRLINNNWGFRPKRLNFKLFNIQVKEVTDNNGVKTIANNLTSTVQVFTDSDYQLPYVLGSAHEGCLPPFPADVFMIPQYGYLTLNDGSQAVGRSSFYCLEYFPSQMLRTGNNFQFSYEFENVPFHSSYAHSQSLDRLMNPLIDQYLYYLSKTQRKSGSPHSKAQNQQTLKFSVAGPSNMAVQGRNYIPGPSYRQQRVSTTVTQNNNSEFAWPGASSWALNGRNSLMNPGPAMASHKEGEDRFFPLSGSLIFGKQGTGRDNVDADKVMITNEEEIKTTNPVATESYGQVATNHQSAQAQAQTGWVQNQGILPGMVWQDRDVYLQGPIWAKIPHTDGNFHPSPLMGGFGMKHPPPQILIKNTPVPADPPTAFNKDKLNSFITQYSTGQVSVEIEWELQKENSKRWNPEIQYTSNYYKSNNVEFAVNTEGVYSEPRPIGTRYLTRNL

SEQ ID NO: 47 - protein, 742 aa, synthetic construct
MAADGYLPDWLEDNLSEGIREWWALKPGAPQPKANQQHQDNARGLVLPGYKYLGPGNGLDKGEPVNAADAAALEHDKAYDQQLKAGDNPYLKYNHADAEFQERLKEDTSFGGNLGRAVFQAKKRLLEPLGLVEEAAKTAPGKKRPVEQSPQEPDSSAGIGKSGAQPAKKRLNFGQTGDTESVPDPQPIGEPPAAPSGVGSLTMASGGGAPVADNNEGADGVGSSSGNWHCDSQWLGDRVITTSTRTWALPTYNNHLYKQISNSTSGGSSNDNAYFGYSTPWGYFDFNRFHCHFSPRDWQRLINNNWGFRPKRLNFKLFNIQVKEVTDNNGVKTIANNLTSTVQVFTDSDYQLPYVLGSAHEGCLPPFPADVFMIPQYGYLTLNDGSQAVGRSSFYCLEYFPSQMLRTGNNFQFSYEFENVPFHSSYAHSQSLDRLMNPLIDQYLYYLSKTINGSGSPHSKAQARKTLKFSVAGPSNMAVQGRNYIPGPSYRQQRVSTTVTQNNNSEFAWPGASSWALNGRNSLMNPGPAMASHKEGEDRFFPLSGSLIFGKQGTGRDNVDADKVMITNEEEIKTTNPVATESYGQVATNHQSAQAQAQTGWVQNQGILPGMVWQDRDVYLQGPIWAKIPHTDGNFHPSPLMGGFGMKHPPPQILIKNTPVPADPPTAFNKDKLNSFITQYSTGQVSVEIEWELQKENSKRWNPEIQYTSNYYKSNNVEFAVNTEGVYSEPRPIGTRYLTRNL

SEQ ID NO: 48 - protein, 742 aa, synthetic construct
MAADGYLPDWLEDNLSEGIREWWALKPGAPQPKANQQHQDNARGLVLPGYKYLGPGNGLDKGEPVNAADAAALEHDKAYDQQLKAGDNPYLKYNHADAEFQERLKEDTSFGGNLGRAVFQAKKRLLEPLGLVEEAAKTAPGKKRPVEQSPQEPDSSAGIGKSGAQPAKKRLNFGQTGDTESVPDPQPIGEPPAAPSGVGSLTMASGGGAPVADNNEGADGVGSSSGNWHCDSQWLGDRVITTSTRTWALPTYNNHLYKQISNSTSGGSSNDNAYFGYSTPWGYFDFNRFHCHFSPRDWQRLINNNWGFRPKRLNFKLFNIQVKEVTDNNGVKTIANNLTSTVQVFTDSDYQLPYVLGSAHEGCLPPFPADVFMIPQYGYLTLNDGSQAVGRSSFYCLEYFPSQMLRTGNNFQFSYEFENVPFHSSYAHSQSLDRLMNPLIDQYLYYLSKYIVGSGSPHSKAQNQQTLKFSVAGPSNMAVQGRNYIPGPSYRQQRVSTTVTQNNNSEFAWPGASSWALNGRNSLMNPGPAMASHKEGEDRFFPLSGSLIFGKQGTGRDNVDADKVMITNEEEIKTTNPVATESYGQVATNHQSAQAQAQTGWVQNQGILPGMVWQDRDVYLQGPIWAKIPHTDGNFHPSPLMGGFGMKHPPPQILIKNTPVPADPPTAFNKDKLNSFITQYSTGQVSVEIEWELQKENSKRWNPEIQYTSNYYKSNNVEFAVNTEGVYSEPRPIGTRYLTRNL

SEQ ID NO: 49 - protein, 742 aa, synthetic construct
MAADGYLPDWLEDNLSEGIREWWALKPGAPQPKANQQHQDNARGLVLPGYKYLGPGNGLDKGEPVNAADAAALEHDKAYDQQLKAGDNPYLKYNHADAEFQERLKEDTSFGGNLGRAVFQAKKRLLEPLGLVEEAAKTAPGKKRPVEQSPQEPDSSAGIGKSGAQPAKKRLNFGQTGDTESVPDPQPIGEPPAAPSGVGSLTMASGGGAPVADNNEGADGVGSSSGNWHCDSQWLGDRVITTSTRTWALPTYNNHLYKQISNSTSGGSSNDNAYFGYSTPWGYFDFNRFHCHFSPRDWQRLINNNWGFRPKRLNFKLFNIQVKEVTDNNGVKTIANNLTSTVQVFTDSDYQLPYVLGSAHEGCLPPFPADVFMIPQYGYLTLNDGSQAVGRSSFYCLEYFPSQMLRTGNNFQFSYEFENVPFHSSYAHSQSLDRLMNPLIDQYLYYLSKTISKRGSPHSKAQNQQTLKFSVAGPSNMAVQGRNYIPGPSYRQQRVSTTVTQNNNSEFAWPGASSWALNGRNSLMNPGPAMASHKEGEDRFFPLSGSLIFGKQGTGRDNVDADKVMITNEEEIKTTNPVATESYGQVATNHQSAQAQAQTGWVQNQGILPGMVWQDRDVYLQGPIWAKIPHTDGNFHPSPLMGGFGMKHPPPQILIKNTPVPADPPTAFNKDKLNSFITQYSTGQVSVEIEWELQKENSKRWNPEIQYTSNYYKSNNVEFAVNTEGVYSEPRPIGTRYLTRNL

SEQ ID NO: 50 - protein, 742 aa, synthetic construct
MAADGYLPDWLEDNLSEGIREWWALKPGAPQPKANQQHQDNARGLVLPGYKYLGPGNGLDKGEPVNAADAAALEHDKAYDQQLKAGDNPYLKYNHADAEFQERLKEDTSFGGNLGRAVFQAKKRLLEPLGLVEEAAKTAPGKKRPVEQSPQEPDSSAGIGKSGAQPAKKRLNFGQTGDTESVPDPQPIGEPPAAPSGVGSLTMASGGGAPVADNNEGADGVGSSSGNWHCDSQWLGDRVITTSTRTWALPTYNNHLYKQISNSTSGGSSNDNAYFGYSTPWGYFDFNRFHCHFSPRDWQRLINNNWGFRPKRLNFKLFNIQVKEVTDNNGVKTIANNLTSTVQVFTDSDYQLPYVLGSAHEGCLPPFPADVFMIPQYGYLTLNDGSQAVGRSSFYCLEYFPSQMLRTGNNFQFSYEFENVPFHSSYAHSQSLDRLMNPLIDQYLYYLSKGLGGSGSPHSKAQNQQTLKFSVAGPSNMAVQGRNYIPGPSYRQQRVSTTVTQNNNSEFAWPGASSWALNGRNSLMNPGPAMASHKEGEDRFFPLSGSLIFGKQGTGRDNVDADKVMITNEEEIKTTNPVATESYGQVATNHQSAQAQAQTGWVQNQGILPGMVWQDRDVYLQGPIWAKIPHTDGNFHPSPLMGGFGMKHPPPQILIKNTPVPADPPTAFNKDKLNSFITQYSTGQVSVEIEWELQKENSKRWNPEIQYTSNYYKSNNVEFAVNTEGVYSEPRPIGTRYLTRNL

SEQ ID NO: 51 - protein, 742 aa, synthetic construct
MAADGYLPDWLEDNLSEGIREWWALKPGAPQPKANQQHQDNARGLVLPGYKYLGPGNGLDKGEPVNAADAAALEHDKAYDQQLKAGDNPYLKYNHADAEFQERLKEDTSFGGNLGRAVFQAKKRLLEPLGLVEEAAKTAPGKKRPVEQSPQEPDSSAGIGKSGAQPAKKRLNFGQTGDTESVPDPQPIGEPPAAPSGVGSLTMASGGGAPVADNNEGADGVGSSSGNWHCDSQWLGDRVITTSTRTWALPTYNNHLYKQISNSTSGGSSNDNAYFGYSTPWGYFDFNRFHCHFSPRDWQRLINNNWGFRPKRLNFKLFNIQVKEVTDNNGVKTIANNLTSTVQVFTDSDYQLPYVLGSAHEGCLPPFPADVFMIPQYGYLTLNDGSQAVGRSSFYCLEYFPSQMLRTGNNFQFSYEFENVPFHSSYAHSQSLDRLMNPLIDQYLYYLSKTINGHDSPHSKAQNLQTLKFSVAGPSNMAVQGRNYIPGPSYRQQRVSTTVTQNNNSEFAWPGASSWALNGRNSLMNPGPAMASHKEGEDRFFPLSGSLIFGKQGTGRDNVDADKVMITNEEEIKTTNPVATESYGQVATNHQSAQAQAQTGWVQNQGILPGMVWQDRDVYLQGPIWAKIPHTDGNFHPSPLMGGFGMKHPPPQILIKNTPVPADPPTAFNKDKLNSFITQYSTGQVSVEIEWELQKENSKRWNPEIQYTSNYYKSNNVEFAVNTEGVYSEPRPIGTRYLTRNL

SEQ ID NO: 52 - protein, 742 aa, synthetic construct
MAADGYLPDWLEDNLSEGIREWWALKPGAPQPKANQQHQDNARGLVLPGYKYLGPGNGLDKGEPVNAADAAALEHDKAYDQQLKAGDNPYLKYNHADAEFQERLKEDTSFGGNLGRAVFQAKKRLLEPLGLVEEAAKTAPGKKRPVEQSPQEPDSSAGIGKSGAQPAKKRLNFGQTGDTESVPDPQPIGEPPAAPSGVGSLTMASGGGAPVADNNEGADGVGSSSGNWHCDSQWLGDRVITTSTRTWALPTYNNHLYKQISNSTSGGSSNDNAYFGYSTPWGYFDFNRFHCHFSPRDWQRLINNNWGFRPKRLNFKLFNIQVKEVTDNNGVKTIANNLTSTVQVFTDSDYQLPYVLGSAHEGCLPPFPADVFMIPQYGYLTLNDGSQAVGRSSFYCLEYFPSQMLRTGNNFQFSYEFENVPFHSSYAHSQSLDRLMNPLIDQYLYYLSKTVNGHDSPHSKAQNQQTLKFSVAGPSNMAVQGRNYIPGPSYRQQRVSTTVTQNNNSEFAWPGASSWALNGRNSLMNPGPAMASHKEGEDRFFPLSGSLIFGKQGTGRDNVDADKVMITNEEEIKTTNPVATESYGQVATNHQSAQAQAQTGWVQNQGILPGMVWQDRDVYLQGPIWAKIPHTDGNFHPSPLMGGFGMKHPPPQILIKNTPVPADPPTAFNKDKLNSFITQYSTGQVSVEIEWELQKENSKRWNPEIQYTSNYYKSNNVEFAVNTEGVYSEPRPIGTRYLTRNL

SEQ ID NO: 53 - protein, 742 aa, synthetic construct
MAADGYLPDWLEDNLSEGIREWWALKPGAPQPKANQQHQDNARGLVLPGYKYLGPGNGLDKGEPVNAADAAALEHDKAYDQQLKAGDNPYLKYNHADAEFQERLKEDTSFGGNLGRAVFQAKKRLLEPLGLVEEAAKTAPGKKRPVEQSPQEPDSSAGIGKSGAQPAKKRLNFGQTGDTESVPDPQPIGEPPAAPSGVGSLTMASGGGAPVADNNEGADGVGSSSGNWHCDSQWLGDRVITTSTRTWALPTYNNHLYKQISNSTSGGSSNDNAYFGYSTPWGYFDFNRFHCHFSPRDWQRLINNNWGFRPKRLNFKLFNIQVKEVTDNNGVKTIANNLTSTVQVFTDSDYQLPYVLGSAHEGCLPPFPADVFMIPQYGYLTLNDGSQAVGRSSFYCLEYFPSQMLRTGNNFQFSYEFENVPFHSSYAHSQSLDRLMNPLIDQYLYYLSKTINGHDSPHSKALNQQTLKFSVAGPSNMAVQGRNYIPGPSYRQQRVSTTVTQNNNSEFAWPGASSWALNGRNSLMNPGPAMASHKEGEDRFFPLSGSLIFGKQGTGRDNVDADKVMITNEEEIKTTNPVATESYGQVATNHQSAQAQAQTGWVQNQGILPGMVWQDRDVYLQGPIWAKIPHTDGNFHPSPLMGGFGMKHPPPQILIKNTPVPADPPTAFNKDKLNSFITQYSTGQVSVEIEWELQKENSKRWNPEIQYTSNYYKSNNVEFAVNTEGVYSEPRPIGTRYLTRNL

SEQ ID NO: 54 - protein, 742 aa, synthetic construct
MAADGYLPDWLEDNLSEGIREWWALKPGAPQPKANQQHQDNARGLVLPGYKYLGPGNGLDKGEPVNAADAAALEHDKAYDQQLKAGDNPYLKYNHADAEFQERLKEDTSFGGNLGRAVFQAKKRLLEPLGLVEEAAKTAPGKKRPVEQSPQEPDSSAGIGKSGAQPAKKRLNFGQTGDTESVPDPQPIGEPPAAPSGVGSLTMASGGGAPVADNNEGADGVGSSSGNWHCDSQWLGDRVITTSTRTWALPTYNNHLYKQISNSTSGGSSNDNAYFGYSTPWGYFDFNRFHCHFSPRDWQRLINNNWGFRPKRLNFKLFNIQVKEVTDNNGVKTIANNLTSTVQVFTDSDYQLPYVLGSAHEGCLPPFPADVFMIPQYGYLTLNDGSQAVGRSSFYCLEYFPSQMLRTGNNFQFSYEFENVPFHSSYAHSQSLDRLMNPLIDQYLYYLSKTINGHDSPHSKAQNQQSLKFSVAGPSNMAVQGRNYIPGPSYRQQRVSTTVTQNNNSEFAWPGASSWALNGRNSLMNPGPAMASHKEGEDRFFPLSGSLIFGKQGTGRDNVDADKVMITNEEEIKTTNPVATESYGQVATNHQSAQAQAQTGWVQNQGILPGMVWQDRDVYLQGPIWAKIPHTDGNFHPSPLMGGFGMKHPPPQILIKNTPVPADPPTAFNKDKLNSFITQYSTGQVSVEIEWELQKENSKRWNPEIQYTSNYYKSNNVEFAVNTEGVYSEPRPIGTRYLTRNL

SEQ ID NO: 55 - protein, 742 aa, synthetic construct
MAADGYLPDWLEDNLSEGIREWWALKPGAPQPKANQQHQDNARGLVLPGYKYLGPGNGLDKGEPVNAADAAALEHDKAYDQQLKAGDNPYLKYNHADAEFQERLKEDTSFGGNLGRAVFQAKKRLLEPLGLVEEAAKTAPGKKRPVEQSPQEPDSSAGIGKSGAQPAKKRLNFGQTGDTESVPDPQPIGEPPAAPSGVGSLTMASGGGAPVADNNEGADGVGSSSGNWHCDSQWLGDRVITTSTRTWALPTYNNHLYKQISNSTSGGSSNDNAYFGYSTPWGYFDFNRFHCHFSPRDWQRLINNNWGFRPKRLNFKLFNIQVKEVTDNNGVKTIANNLTSTVQVFTDSDYQLPYVLGSAHEGCLPPFPADVFMIPQYGYLTLNDGSQAVGRSSFYCLEYFPSQMLRTGNNFQFSYEFENVPFHSSYAHSQSLDRLMNPLIDQYLYYLSKTINGHDSPHSKAQNQQILKFSVAGPSNMAVQGRNYIPGPSYRQQRVSTTVTQNNNSEFAWPGASSWALNGRNSLMNPGPAMASHKEGEDRFFPLSGSLIFGKQGTGRDNVDADKVMITNEEEIKTTNPVATESYGQVATNHQSAQAQAQTGWVQNQGILPGMVWQDRDVYLQGPIWAKIPHTDGNFHPSPLMGGFGMKHPPPQILIKNTPVPADPPTAFNKDKLNSFITQYSTGQVSVEIEWELQKENSKRWNPEIQYTSNYYKSNNVEFAVNTEGVYSEPRPIGTRYLTRNL

SEQ ID NO: 56 - protein, 742 aa, synthetic construct
MAADGYLPDWLEDNLSEGIREWWALKPGAPQPKANQQHQDNARGLVLPGYKYLGPGNGLDKGEPVNAADAAALEHDKAYDQQLKAGDNPYLKYNHADAEFQERLKEDTSFGGNLGRAVFQAKKRLLEPLGLVEEAAKTAPGKKRPVEQSPQEPDSSAGIGKSGAQPAKKRLNFGQTGDTESVPDPQPIGEPPAAPSGVGSLTMASGGGAPVADNNEGADGVGSSSGNWHCDSQWLGDRVITTSTRTWALPTYNNHLYKQISNSTSGGSSNDNAYFGYSTPWGYFDFNRFHCHFSPRDWQRLINNNWGFRPKRLNFKLFNIQVKEVTDNNGVKTIANNLTSTVQVFTDSDYQLPYVLGSAHEGCLPPFPADVFMIPQYGYLTLNDGSQAVGRSSFYCLEYFPSQMLRTGNNFQFSYEFENVPFHSSYAHSQSLDRLMNPLIDQYLYYLSKTINGSGSPHFTRQNQQTLKFSVAGPSNMAVQGRNYIPGPSYRQQRVSTTVTQNNNSEFAWPGASSWALNGRNSLMNPGPAMASHKEGEDRFFPLSGSLIFGKQGTGRDNVDADKVMITNEEEIKTTNPVATESYGQVATNHQSAQAQAQTGWVQNQGILPGMVWQDRDVYLQGPIWAKIPHTDGNFHPSPLMGGFGMKHPPPQILIKNTPVPADPPTAFNKDKLNSFITQYSTGQVSVEIEWELQKENSKRWNPEIQYTSNYYKSNNVEFAVNTEGVYSEPRPIGTRYLTRNL

SEQ ID NO: 57 - protein, 742 aa, synthetic construct
MAADGYLPDWLEDNLSEGIREWWALKPGAPQPKANQQHQDNARGLVLPGYKYLGPGNGLDKGEPVNAADAAALEHDKAYDQQLKAGDNPYLKYNHADAEFQERLKEDTSFGGNLGRAVFQAKKRLLEPLGLVEEAAKTAPGKKRPVEQSPQEPDSSAGIGKSGAQPAKKRLNFGQTGDTESVPDPQPIGEPPAAPSGVGSLTMASGGGAPVADNNEGADGVGSSSGNWHCDSQWLGDRVITTSTRTWALPTYNNHLYKQISNSTSGGSSNDNAYFGYSTPWGYFDFNRFHCHFSPRDWQRLINNNWGFRPKRLNFKLFNIQVKEVTDNNGVKTIANNLTSTVQVFTDSDYQLPYVLGSAHEGCLPPFPADVFMIPQYGYLTLNDGSQAVGRSSFYCLEYFPSQMLRTGNNFQFSYEFENVPFHSSYAHSQSLDRLMNPLIDQYLYYLSKTSNGHDSPHSKAQNQQTLKFSVAGPSNMAVQGRNYIPGPSYRQQRVSTTVTQNNNSEFAWPGASSWALNGRNSLMNPGPAMASHKEGEDRFFPLSGSLIFGKQGTGRDNVDADKVMITNEEEIKTTNPVATESYGQVATNHQSAQAQAQTGWVQNQGILPGMVWQDRDVYLQGPIWAKIPHTDGNFHPSPLMGGFGMKHPPPQILIKNTPVPADPPTAFNKDKLNSFITQYSTGQVSVEIEWELQKENSKRWNPEIQYTSNYYKSNNVEFAVNTEGVYSEPRPIGTRYLTRNL

SEQ ID NO: 58 - protein, 742 aa, synthetic construct
MAADGYLPDWLEDNLSEGIREWWALKPGAPQPKANQQHQDNARGLVLPGYKYLGPGNGLDKGEPVNAADAAALEHDKAYDQQLKAGDNPYLKYNHADAEFQERLKEDTSFGGNLGRAVFQAKKRLLEPLGLVEEAAKTAPGKKRPVEQSPQEPDSSAGIGKSGAQPAKKRLNFGQTGDTESVPDPQPIGEPPAAPSGVGSLTMASGGGAPVADNNEGADGVGSSSGNWHCDSQWLGDRVITTSTRTWALPTYNNHLYKQISNSTSGGSSNDNAYFGYSTPWGYFDFNRFHCHFSPRDWQRLINNNWGFRPKRLNFKLFNIQVKEVTDNNGVKTIANNLTSTVQVFTDSDYQLPYVLGSAHEGCLPPFPADVFMIPQYGYLTLNDGSQAVGRSSFYCLEYFPSQMLRTGNNFQFSYEFENVPFHSSYAHSQSLDRLMNPLIDQYLYYLSKTINGSGSPHSLPWNQQTLKFSVAGPSNMAVQGRNYIPGPSYRQQRVSTTVTQNNNSEFAWPGASSWALNGRNSLMNPGPAMASHKEGEDRFFPLSGSLIFGKQGTGRDNVDADKVMITNEEEIKTTNPVATESYGQVATNHQSAQAQAQTGWVQNQGILPGMVWQDRDVYLQGPIWAKIPHTDGNFHPSPLMGGFGMKHPPPQILIKNTPVPADPPTAFNKDKLNSFITQYSTGQVSVEIEWELQKENSKRWNPEIQYTSNYYKSNNVEFAVNTEGVYSEPRPIGTRYLTRNL

SEQ ID NO: 59 - protein, 742 aa, synthetic construct
MAADGYLPDWLEDNLSEGIREWWALKPGAPQPKANQQHQDNARGLVLPGYKYLGPGNGLDKGEPVNAADAAALEHDKAYDQQLKAGDNPYLKYNHADAEFQERLKEDTSFGGNLGRAVFQAKKRLLEPLGLVEEAAKTAPGKKRPVEQSPQEPDSSAGIGKSGAQPAKKRLNFGQTGDTESVPDPQPIGEPPAAPSGVGSLTMASGGGAPVADNNEGADGVGSSSGNWHCDSQWLGDRVITTSTRTWALPTYNNHLYKQISNSTSGGSSNDNAYFGYSTPWGYFDFNRFHCHFSPRDWQRLINNNWGFRPKRLNFKLFNIQVKEVTDNNGVKTIANNLTSTVQVFTDSDYQLPYVLGSAHEGCLPPFPADVFMIPQYGYLTLNDGSQAVGRSSFYCLEYFPSQMLRTGNNFQFSYEFENVPFHSSYAHSQSLDRLMNPLIDQYLYYLSKTINGHDSPHSKAQNHQTLKFSVAGPSNMAVQGRNYIPGPSYRQQRVSTTVTQNNNSEFAWPGASSWALNGRNSLMNPGPAMASHKEGEDRFFPLSGSLIFGKQGTGRDNVDADKVMITNEEEIKTTNPVATESYGQVATNHQSAQAQAQTGWVQNQGILPGMVWQDRDVYLQGPIWAKIPHTDGNFHPSPLMGGFGMKHPPPQILIKNTPVPADPPTAFNKDKLNSFITQYSTGQVSVEIEWELQKENSKRWNPEIQYTSNYYKSNNVEFAVNTEGVYSEPRPIGTRYLTRNL

SEQ ID NO: 60-136 - skipped (77 entries)

SEQ ID NO: 137 - DNA, 2211 bp, synthetic construct
  source 1..2211: mol_type = other DNA
atggctgccgatggttatcttccagattggctcgaggacaaccttagtgaaggaattcgcgagtggtgggctttgaaacctggagcccctcaacccaaggcaaatcaacaacatcaagacaacgctcgaggtcttgtgcttccgggttacaaataccttggacccggcaacggactcgacaagggggagccggtcaacgcagcagacgcggcggccctcgagcacgacaaggcctacgaccagcagctcaaggccggagacaacccgtacctcaagtacaaccacgccgacgccgagttccaggagcggctcaaagaagatacgtcttttgggggcaacctcgggcgagcagtcttccaggccaaaaagaggcttcttgaacctcttggtctggttgaggaagcggctaagacggctcctggaaagaagaggcctgtagagcagtctcctcaggaaccggactcctccgcgggtattggcaaatcgggtgcacagcccgctaaaaagagactcaatttcggtcagactggcgacacagagtcagtcccagaccctcaaccaatcggagaacctcccgcagccccctcaggtgtgggatctcttacaatggcttcaggtggtggcgcaccagtggcagacaataacgaaggtgccgatggagtgggtagttcctcgggaaattggcattgcgattcccaatggctgggggacagagtcatcaccaccagcacccgaacctgggccctgcccacctacaacaatcacctctacaagcaaatctccaacagcacatctggaggatcttcaaatgacaacgcctacttcggctacagcaccccctgggggtattttgacttcaacagattccactgccacttctcaccacgtgactggcagcgactcatcaacaacaactggggattccggcctaagcgactcaacttcaagctcttcaacattcaggtcaaagaggttacggacaacaatggagtcaagaccatcgccaataaccttaccagcacggtccaggtcttcacggactcagactatcagctcccgtacgtgctcgggtcggctcacgagggctgcctcccgccgttcccagcggacgttttcatgattcctcagtacgggtatctgacgcttaatgatggaagccaggccgtgggtcgttcgtccttttactgcctggaatatttcccgtcgcaaatgctaagaacgggtaacaacttccagttcagctacgagtttgagaacgtacctttccatagcagctacgctcacagccaaagcctggaccgactaatgaatccactcatcgaccaatacttgtactatctctcaaagactattaacggttctggacagaatcaacaaacgctaaaattcagtgtggccggacccagcaacatggctgtccagggaagaaactacatacctggacccagctaccgacaacaacgtgtctcaaccactgtgactcaaaacaacaacagcgaatttgcttggcctggagcttcttcttgggctctcaatggacgtaatagcttgatgaatcctggacctgctatggccagccacaaagaaggagaggaccgtttctttcctttgtctggatctttaatttttggcaaacaaggaactggaagagacaacgtggatgcggacaaagtcatgataaccaacgaagaagaaattaaaactactaacccggtagcaacggagtcctatggacaagtggccacaaaccaccagagtgcccaagcacaggcgcagaccggctgggttcaaaaccaaggaatacttccgggtatggtttggcaggacagagatgtgtacctgcaaggacccatttgggccaaaattcctcacacggacggcaactttcacccttctccgctgatgggagggtttggaatgaagcacccgcctcctcagatcctcatcaaaaacacacctgtacctgcggatcctccaacggccttcaacaaggacaagctgaactctttcatcacccagtattctactggccaagtcagcgtggagatcgagtgggagctgcagaaggaaaacagcaagcgctggaacccggagatccagtacacttccaactattacaagtctaataatgttgaatttgctgttaatactgaaggtgtatatagtgaaccccgccccattggcaccagatacctgactcgtaatctgtaa

SEQ ID NO: 138 - protein, 736 aa, synthetic construct
MAADGYLPDWLEDNLSEGIREWWALKPGAPQPKANQQHQDNARGLVLPGYKYLGPGNGLDKGEPVNAADAAALEHDKAYDQQLKAGDNPYLKYNHADAEFQERLKEDTSFGGNLGRAVFQAKKRLLEPLGLVEEAAKTAPGKKRPVEQSPQEPDSSAGIGKSGAQPAKKRLNFGQTGDTESVPDPQPIGEPPAAPSGVGSLTMASGGGAPVADNNEGADGVGSSSGNWHCDSQWLGDRVITTSTRTWALPTYNNHLYKQISNSTSGGSSNDNAYFGYSTPWGYFDFNRFHCHFSPRDWQRLINNNWGFRPKRLNFKLFNIQVKEVTDNNGVKTIANNLTSTVQVFTDSDYQLPYVLGSAHEGCLPPFPADVFMIPQYGYLTLNDGSQAVGRSSFYCLEYFPSQMLRTGNNFQFSYEFENVPFHSSYAHSQSLDRLMNPLIDQYLYYLSKTINGSGQNQQTLKFSVAGPSNMAVQGRNYIPGPSYRQQRVSTTVTQNNNSEFAWPGASSWALNGRNSLMNPGPAMASHKEGEDRFFPLSGSLIFGKQGTGRDNVDADKVMITNEEEIKTTNPVATESYGQVATNHQSAQAQAQTGWVQNQGILPGMVWQDRDVYLQGPIWAKIPHTDGNFHPSPLMGGFGMKHPPPQILIKNTPVPADPPTAFNKDKLNSFITQYSTGQVSVEIEWELQKENSKRWNPEIQYTSNYYKSNNVEFAVNTEGVYSEPRPIGTRYLTRNL

SEQ ID NO: 139-199 - skipped (61 entries)

SEQ ID NO: 200 - protein, 14 aa, synthetic construct
GSGSPHSKAQNQQT

SEQ ID NO: 201 - protein, 14 aa, synthetic construct
GHDSPHKSGQNQQT

SEQ ID NO: 202 - protein, 14 aa, synthetic construct
GSGSPHARMQNQQT

SEQ ID NO: 203 - protein, 14 aa, synthetic construct
GSGSPHVKSQNQQT

SEQ ID NO: 204 - protein, 14 aa, synthetic construct
GQDSPHKSGQNQQT

SEQ ID NO: 205 - protein, 14 aa, synthetic construct
GSGSPHASRQNQQT

SEQ ID NO: 206 - protein, 14 aa, synthetic construct
GSGSPHASRQNKQT

SEQ ID NO: 207 - protein, 14 aa, synthetic construct
GSGSPHVKIQNQQT

SEQ ID NO: 208 - protein, 14 aa, synthetic construct
GSGSPHSKAKNQQT

SEQ ID NO: 209 - protein, 14 aa, synthetic construct
GSGSPHKKNQNQQT

SEQ ID NO: 210 - protein, 14 aa, synthetic construct
GSGSPHVRMQNQQT

SEQ ID NO: 211 - protein, 14 aa, synthetic construct
GSGSPHASRQKQQT

SEQ ID NO: 212 - protein, 14 aa, synthetic construct
GHSSPHRSGQNQQT

SEQ ID NO: 213 - protein, 14 aa, synthetic construct
GMRTYHLSGQNQQT

SEQ ID NO: 214 - protein, 14 aa, synthetic construct
GSGSPHTRGQNQQT

SEQ ID NO: 215 - protein, 14 aa, synthetic construct
GSGIIPVSSQNQQT

SEQ ID NO: 216 - protein, 14 aa, synthetic construct
GSEYGHKSGQNQQT

SEQ ID NO: 217 - protein, 14 aa, synthetic construct
GRGQNVSSVHRQQT

SEQ ID NO: 218 - protein, 14 aa, synthetic construct
GSSHRFYGGQNQQT

SEQ ID NO: 219 - protein, 14 aa, synthetic construct
GYFVAAWSGQNQQT

SEQ ID NO: 220 - protein, 14 aa, synthetic construct
GSVLHSHAAQNQQT

SEQ ID NO: 221 - protein, 14 aa, synthetic construct
GSGDLVVSTQNQQT

SEQ ID NO: 222 - protein, 14 aa, synthetic construct
GSYGMAASGQNQQT

SEQ ID NO: 223 - protein, 14 aa, synthetic construct
GLNHFGASGQNQQT

SEQ ID NO: 224 - protein, 14 aa, synthetic construct
GSTGSHSAGQNQHT

SEQ ID NO: 225 - protein, 14 aa, synthetic construct
GLAGHTVSGQNQQT

SEQ ID NO: 226 - protein, 14 aa, synthetic construct
GIILGASSGQNQQT

SEQ ID NO: 227 - protein, 14 aa, synthetic construct
GSGVSTYNIQNQQT

SEQ ID NO: 228 - protein, 14 aa, synthetic construct
GSLVSVQTGQNQQT

SEQ ID NO: 229 - protein, 14 aa, synthetic construct
GQSSPHRSGQNQQT

SEQ ID NO: 230 - protein, 14 aa, synthetic construct
GREYGHKSGQNQQT

SEQ ID NO: 231 - protein, 14 aa, synthetic construct
GHTLTLSSGQNQQT

SEQ ID NO: 232 - protein, 14 aa, synthetic construct
GSITLIPSGQNQQT

SEQ ID NO: 233 - protein, 14 aa, synthetic construct
GSNGFTALGQNQQT

SEQ ID NO: 234 - protein, 14 aa, synthetic construct
GSGHSSHSVQNQQT

SEQ ID NO: 235 - protein, 14 aa, synthetic construct
GSGIPQRSGKNQQT

SEQ ID NO: 236 - protein, 14 aa, synthetic construct
GSGDTLHMLQNQQT

SEQ ID NO: 237 - protein, 14 aa, synthetic construct
GERHTVLSGQNQQT

SEQ ID NO: 238 - protein, 14 aa, synthetic construct
GSGMPQSHIQNQQT

SEQ ID NO: 239 - protein, 14 aa, synthetic construct
GSGQLSGIGGNQQT

SEQ ID NO: 240 - protein, 14 aa, synthetic construct
GSGQNRKPASFAQT

SEQ ID NO: 241 - protein, 14 aa, synthetic construct
GSGSVSQLGQNQQT

SEQ ID NO: 242 - protein, 14 aa, synthetic construct
GSDFLGTHGQNQQT

SEQ ID NO: 243 - protein, 14 aa, synthetic construct
GQIVQNPSGQNQQT

SEQ ID NO: 244 - protein, 14 aa, synthetic construct
GSGTQIPSQQNQQT

SEQ ID NO: 245 - protein, 14 aa, synthetic construct
GSGQNQQSAREGLT

SEQ ID NO: 246 - protein, 14 aa, synthetic construct
GSGLGMSTGQNQQT

SEQ ID NO: 247 - protein, 14 aa, synthetic construct
GSGLPVLSGQNQQT

SEQ ID NO: 248 - protein, 14 aa, synthetic construct
GSGHSIRTDQNQQT

SEQ ID NO: 249 - protein, 14 aa, synthetic construct
GSGQSVQTVVNQQT

SEQ ID NO: 250 - protein, 14 aa, synthetic construct
GSGQNRAQSRFQQT

SEQ ID NO: 251 - protein, 14 aa, synthetic construct
GGGDLGRSSQNQQT

SEQ ID NO: 252 - protein, 14 aa, synthetic construct
GGGTKMDSGQNQQT

SEQ ID NO: 253 - protein, 14 aa, synthetic construct
GSGSPHPSRQNQQT

SEQ ID NO: 254 - protein, 14 aa, synthetic construct
GSGQFTNAGMNQQT

SEQ ID NO: 255 - protein, 14 aa, synthetic construct
GGRNGHTVGQNQQT

SEQ ID NO: 256 - protein, 14 aa, synthetic construct
GSGFGPQTGQNQQT

SEQ ID NO: 257 - protein, 14 aa, synthetic construct
GRTDSHTSGQNQQT

SEQ ID NO: 258 - protein, 14 aa, synthetic construct
GYEVLGSSGQNQQT

SEQ ID NO: 259 - protein, 14 aa, synthetic construct
GSVHLSVTGQNQQT

SEQ ID NO: 260 - protein, 14 aa, synthetic construct
GFMSYKGSGQNQQT

SEQ ID NO: 261 - protein, 14 aa, synthetic construct
GNIAGSVSGQNQQT

SEQ ID NO: 262 - protein, 14 aa, synthetic construct
GSGSHRDVSQNQQT

SEQ ID NO: 263 - protein, 14 aa, synthetic construct
GGLGSMSSGQNQQT

SEQ ID NO: 264 - protein, 14 aa, synthetic construct
GSGHLPQSAQNQQT

SEQ ID NO: 265 - protein, 14 aa, synthetic construct
GGVLVGGSGQNQQT

SEQ ID NO: 266 - protein, 14 aa, synthetic construct
GTHPYTSSGQNQQT

SEQ ID NO: 267 - protein, 14 aa, synthetic construct
GSGQNQQLKENRST

SEQ ID NO: 268 - protein, 14 aa, synthetic construct
GSGQNQQTSPHNHT

SEQ ID NO: 269 - protein, 14 aa, synthetic construct
GSGTLYPQSQNQQT

SEQ ID NO: 270 - protein, 14 aa, synthetic construct
GSGQNQQSNWITKT

SEQ ID NO: 271 - protein, 14 aa, synthetic construct
GSGYTSLFLQNQQT

SEQ ID NO: 272 - protein, 14 aa, synthetic construct
GSGVMTHVLQNQQT

SEQ ID NO: 273 - protein, 14 aa, synthetic construct
GSVSDVRAGQNQQT

SEQ ID NO: 274 - protein, 14 aa, synthetic construct
GSGQSHMATLNQQT

SEQ ID NO: 275 - protein, 14 aa, synthetic construct
GSGLSVHLAQNQQT

SEQ ID NO: 276 - protein, 14 aa, synthetic construct
GSGLSHATQQNQQT

SEQ ID NO: 277 - protein, 14 aa, synthetic construct
GSGLSVQSGQNQQT

SEQ ID NO: 278 - protein, 14 aa, synthetic construct
GSGHMTYREKNQQT

SEQ ID NO: 279 - protein, 14 aa, synthetic construct
GSKGVPTPGQNQQT

SEQ ID NO: 280 - protein, 14 aa, synthetic construct
GSGLLPLSSQNQQT

SEQ ID NO: 281 - protein, 14 aa, synthetic construct
GNGLYAVSGQNQQT

SEQ ID NO: 282 - protein, 14 aa, synthetic construct
GFNGSPSSGQNQQT

SEQ ID NO: 283 - protein, 14 aa, synthetic construct
GSGQIRHSDQNQQT

SEQ ID NO: 284 - protein, 14 aa, synthetic construct
GGQVAPSSGQNQQT

SEQ ID NO: 285 - protein, 14 aa, synthetic construct
GSFSMHTHGQNQQT

SEQ ID NO: 286 - protein, 14 aa, synthetic construct
GSGQNQQVIQGSNT

SEQ ID NO: 287 - protein, 14 aa, synthetic construct
GRVLHSHAGQNQQT

SEQ ID NO: 288 - protein, 14 aa, synthetic construct
GSGQNQQTSLQDQT

SEQ ID NO: 289 - protein, 14 aa, synthetic construct
GSGLGRAPVQNQQT

SEQ ID NO: 290 - protein, 14 aa, synthetic construct
GNGFSSASGQNQQT

SEQ ID NO: 291 - protein, 14 aa, synthetic construct
GSGQMASRESNQQT

SEQ ID NO: 292 - protein, 14 aa, synthetic construct
GPGLPNHSGQNQQT

SEQ ID NO: 293 - protein, 14 aa, synthetic construct
GNIQWQGSGQNQQT

SEQ ID NO: 294 - protein, 14 aa, synthetic construct
GMSAHMSSGQNQQT

SEQ ID NO: 295 - protein, 14 aa, synthetic construct
GHSFVNRSGQNQQT

SEQ ID NO: 296 - protein, 14 aa, synthetic construct
GRAVMDHSGQNQQT

SEQ ID NO: 297 - protein, 14 aa, synthetic construct
GALTVMQSGQNQQT

SEQ ID NO: 298 - protein, 14 aa, synthetic construct
GSGQRSPVLPNQQT

SEQ ID NO: 299 - protein, 14 aa, synthetic construct
GSGQNGHLSLKQQT

SEQ ID NO: 300 - protein, 14 aa, synthetic construct
GSLPRGTSDQNQQT

SEQ ID NO: 301 - protein, 14 aa, synthetic construct
GVAGSLVSGQNQQT

SEQ ID NO: 302 - protein, 14 aa, synthetic construct
GRGGIPQSGQNQQT

SEQ ID NO: 303 - protein, 14 aa, synthetic construct
GSGQYASSIPNQQT

SEQ ID NO: 304 - protein, 14 aa, synthetic construct
GTDFGRQSSQNQQT

SEQ ID NO: 305 - protein, 14 aa, synthetic construct
GIFMQTPSGQNQQT

SEQ ID NO: 306 - protein, 14 aa, synthetic construct
GSGQNQQTRLVDLT

SEQ ID NO: 307 - protein, 14 aa, synthetic construct
GTREMPLSGQNQQT

SEQ ID NO: 308 - protein, 14 aa, synthetic construct
GSRLVHVHGQNQQT

SEQ ID NO: 309 - protein, 14 aa, synthetic construct
GSGRLVPNGPNQQT

SEQ ID NO: 310 - protein, 14 aa, synthetic construct
GSGYLRESPQNQQT

SEQ ID NO: 311 - protein, 14 aa, synthetic construct
GARIQNASGQKQQT

SEQ ID NO: 312 - protein, 14 aa, synthetic construct
GLSNPMPSGQNQQT

SEQ ID NO: 313 - protein, 14 aa, synthetic construct
GSTVQDTRGQNQQT

SEQ ID NO: 314 - protein, 14 aa, synthetic construct
GPFGMPSSGQNQQT

SEQ ID NO: 315 - protein, 14 aa, synthetic construct
GSGQNHGVLSNQQT

SEQ ID NO: 316 - protein, 14 aa, synthetic construct
GSGYSMSQAQNQQT

SEQ ID NO: 317 - protein, 14 aa, synthetic construct
GSGMLTHTLQNQQT

SEQ ID NO: 318 - protein, 14 aa, synthetic construct
GRGSPHASRQNQQT

SEQ ID NO: 319 - protein, 14 aa, synthetic construct
GLSWPSTSGQNQQT

SEQ ID NO: 320 - protein, 14 aa, synthetic construct
GNSMERTSGQNQQT

SEQ ID NO: 321 - protein, 14 aa, synthetic construct
GSGMSPSTLQNQQT

SEQ ID NO: 322 - protein, 14 aa, synthetic construct
GSGHGQVLSQNQQT

SEQ ID NO: 323 - protein, 14 aa, synthetic construct
GRGQIYSTGGNQQT

SEQ ID NO: 324 - protein, 14 aa, synthetic construct
GVVAAHNSGQNQQT

SEQ ID NO: 325 - protein, 14 aa, synthetic construct
GDSSLRHSGQNQQT

SEQ ID NO: 326 - protein, 14 aa, synthetic construct
GSLVSQGAGQNQQT

SEQ ID NO: 327 - protein, 14 aa, synthetic construct
GSLLQAHSGQNQQT

SEQ ID NO: 328 - protein, 14 aa, synthetic construct
GSGHIYVGIQNQQT

SEQ ID NO: 329 - protein, 14 aa, synthetic construct
GHHTTVQSGQNQQT

SEQ ID NO: 330 - protein, 14 aa, synthetic construct
GSRQSKRNELNQQT

SEQ ID NO: 331 - protein, 14 aa, synthetic construct
GSGQNQQHVSSPRT

SEQ ID NO: 332 - protein, 14 aa, synthetic construct
GSSKELLWGQNQQT

SEQ ID NO: 333 - protein, 14 aa, synthetic construct
GSLSTPSSGQNQQT

SEQ ID NO: 334 - protein, 14 aa, synthetic construct
GSIGYAGQGQNQQT

SEQ ID NO: 335 - protein, 14 aa, synthetic construct
GSGQNQRVSNSQQT

SEQ ID NO: 336 - protein, 14 aa, synthetic construct
GSGYASHVQQNQQT

SEQ ID NO: 337 - protein, 14 aa, synthetic construct
GSGEYSRSGQNQQT

SEQ ID NO: 338 - protein, 14 aa, synthetic construct
GSVSTHSSGQNQQT

SEQ ID NO: 339 - protein, 14 aa, synthetic construct
GSGQNQHSLGNYQT

SEQ ID NO: 340 - protein, 14 aa, synthetic construct
GSGGLDTRGQNQQT

SEQ ID NO: 341 - protein, 14 aa, synthetic construct
GNILHATSGQNQQT

SEQ ID NO: 342 - protein, 14 aa, synthetic construct
GSGQSYTMTQNQQT

SEQ ID NO: 343 - protein, 14 aa, synthetic construct
GSGQNQHSAPNSQT

SEQ ID NO: 344 - protein, 14 aa, synthetic construct
GSGQNQQTMDHNRT

SEQ ID NO: 345 - protein, 14 aa, synthetic construct
GSNGGVGTGQNQQT

SEQ ID NO: 346 - protein, 14 aa, synthetic construct
GAGSIIPSGQNQQT

SEQ ID NO: 347 - protein, 14 aa, synthetic construct
GSGQTHGGQHNQQT

SEQ ID NO: 348 - protein, 14 aa, synthetic construct
GSNLSFQSGQNQQT

SEQ ID NO: 349 - protein, 14 aa, synthetic construct
GATLQVHSGQNQQT

SEQ ID NO: 350 - protein, 14 aa, synthetic construct
GSGFNQRSEQNQQT

SEQ ID NO: 351 - protein, 14 aa, synthetic construct
GSGSLRDFDQNQQT

SEQ ID NO: 352 - protein, 14 aa, synthetic construct
GSGDSITGKQNQQT

SEQ ID NO: 353 - protein, 14 aa, synthetic construct
GSGQDRNIVQNQQT

SEQ ID NO: 354 - protein, 14 aa, synthetic construct
GSGLSHSHQQNQQT

SEQ ID NO: 355 - protein, 14 aa, synthetic construct
GSGQNQQTGMSSVK

SEQ ID NO: 356 - protein, 14 aa, synthetic construct
GSVTHGISGQNQQT

SEQ ID NO: 357 - protein, 14 aa, synthetic construct
GVVAHQPSGQNQQT

SEQ ID NO: 358 - protein, 14 aa, synthetic construct
GSGPILGQLQNQQT

SEQ ID NO: 359 - protein, 14 aa, synthetic construct
GSGHVPNSGLNQQT

SEQ ID NO: 360 - protein, 14 aa, synthetic construct
GDAGVRSSGQNQQT

SEQ ID NO: 361 - protein, 14 aa, synthetic construct
GSGSQLMSLQNQQT

SEQ ID NO: 362 - protein, 14 aa, synthetic construct
GSGLDYSQRQNQQT

SEQ ID NO: 363 - protein, 14 aa, synthetic construct
GSGQSSGRLINKQT

SEQ ID NO: 364 - protein, 14 aa, synthetic construct
GSSVSPSSGQNQQT

SEQ ID NO: 365 - protein, 14 aa, synthetic construct
GSGQVVGLSGNQQT

SEQ ID NO: 366 - protein, 14 aa, synthetic construct
GSNMGVPLGQNQQT

SEQ ID NO: 367 - protein, 14 aa, synthetic construct
GSFYPSSTGQNQQT

SEQ ID NO: 368 - protein, 14 aa, synthetic construct
GSGQNQQTRLTDLT

SEQ ID NO: 369 - protein, 14 aa, synthetic construct
GPTNGRSSGQNQQT

SEQ ID NO: 370 - protein, 14 aa, synthetic construct
GSGLLHGKLQNQQT

SEQ ID NO: 371 - protein, 14 aa, synthetic construct
GANMGHVSGQNQQT

SEQ ID NO: 372 - protein, 14 aa, synthetic construct
GSGQNQQSGRGDLT

SEQ ID NO: 373 - protein, 14 aa, synthetic construct
GSHGHYASGQKQQT

SEQ ID NO: 374 - protein, 14 aa, synthetic construct
GSGDLRISPQNQQT

SEQ ID NO: 375 - protein, 14 aa, synthetic construct
GSGMPVILGQNQQT

SEQ ID NO: 376 - protein, 14 aa, synthetic construct
GRGVITSSGQNHQT

SEQ ID NO: 377 - protein, 14 aa, synthetic construct
GSGHSVSGPQNQQT

SEQ ID NO: 378 - protein, 14 aa, synthetic construct
GSRNGHTVGRNQQT

SEQ ID NO: 379 - protein, 14 aa, synthetic construct
GAGVHMVSGQNQQT

SEQ ID NO: 380 - protein, 14 aa, synthetic construct
GSGQNHRPSVLQQT

SEQ ID NO: 381 - protein, 14 aa, synthetic construct
GSGSPRDSIQNQQT

SEQ ID NO: 382 - protein, 14 aa, synthetic construct
GSGQGIHSSVNQQT

SEQ ID NO: 383 - protein, 14 aa, synthetic construct
GSGQQLSITPNQQT

SEQ ID NO: 384 - protein, 14 aa, synthetic construct
GGYHSQTSGQNQQT

SEQ ID NO: 385 - protein, 14 aa, synthetic construct
GSLHHDNHGQNQQT

SEQ ID NO: 386 - protein, 14 aa, synthetic construct
GIMARDSSGQNQQT

SEQ ID NO: 387 - protein, 14 aa, synthetic construct
GVVHITNSGQNQQT

SEQ ID NO: 388 - protein, 14 aa, synthetic construct
GSGQNQHSAPFNQT

SEQ ID NO: 389 - protein, 14 aa, synthetic construct
GSGQTSGLKQNQQT

SEQ ID NO: 390 - protein, 14 aa, synthetic construct
GSGQNQQTSLSNTA

SEQ ID NO: 391 - protein, 14 aa, synthetic construct
GSGQNQAVHNKSQT

SEQ ID NO: 392 - protein, 14 aa, synthetic construct
GVHTHLPSGQNQQT

SEQ ID NO: 393 - protein, 14 aa, synthetic construct
GHLTMHNSGQNHQT

SEQ ID NO: 394 - protein, 14 aa, synthetic construct
GSGSSSRPYQNQQT

SEQ ID NO: 395 - protein, 14 aa, synthetic construct
GILLATPSGQNQQT

SEQ ID NO: 396 - protein, 14 aa, synthetic construct
GSGQNAGSFPNQQT

SEQ ID NO: 397 - protein, 14 aa, synthetic construct
GSRDGHTVGQNQQT

SEQ ID NO: 398 - protein, 14 aa, synthetic construct
GSLLISTSGQNQQT

SEQ ID NO: 399 - protein, 14 aa, synthetic construct
GSGAMPSHGQNQQT

SEQ ID NO: 400 - protein, 14 aa, synthetic construct
GALVSPISGQNQQT

SEQ ID NO: 401 - protein, 14 aa, synthetic construct
GSLSSHGVGQNQQT

SEQ ID NO: 402 - protein, 14 aa, synthetic construct
GSGQNQQASLAMRT

SEQ ID NO: 403 - protein, 14 aa, synthetic construct
GPGLGSHSGQNQQT

SEQ ID NO: 404 - protein, 14 aa, synthetic construct
GHDSQHKSGQNQQT

SEQ ID NO: 405 - protein, 14 aa, synthetic construct
GSGLTLSATQNQQT

SEQ ID NO: 406 - protein, 14 aa, synthetic construct
GSGQVVAHVGNQQT

SEQ ID NO: 407 - protein, 14 aa, synthetic construct
GSGLRTMTTQNQQT

SEQ ID NO: 408 - protein, 14 aa, synthetic construct
GSGQVGRLLQNQQT

SEQ ID NO: 409 - protein, 14 aa, synthetic construct
GSGQLSHQSVNQQT

SEQ ID NO: 410 - protein, 14 aa, synthetic construct
GSGDRYQTLQNQQT

SEQ ID NO: 411 - protein, 14 aa, synthetic construct
GSGQNQQLKSSAQT

SEQ ID NO: 412 - protein, 14 aa, synthetic construct
GSGQNQYSIPVAQT

SEQ ID NO: 413 - protein, 14 aa, synthetic construct
GSGERLHLTQNQQT

SEQ ID NO: 414 - protein, 14 aa, synthetic construct
GSGHNQQVRTAPNT

SEQ ID NO: 415 - protein, 14 aa, synthetic construct
GGLSHVMSGQNQQT

SEQ ID NO: 416 - protein, 14 aa, synthetic construct
GSGQSHRDVLNQQT

SEQ ID NO: 417 - protein, 14 aa, synthetic construct
GSGQNLAGRMDQQT

SEQ ID NO: 418 - protein, 14 aa, synthetic construct
GSGQNQQTNRGNPM

SEQ ID NO: 419 - protein, 14 aa, synthetic construct
GSGQSYQRDHNQQT

SEQ ID NO: 420 - protein, 14 aa, synthetic construct
GSLLSAGMGQNQHT

SEQ ID NO: 421 - protein, 14 aa, synthetic construct
GSGQNQQTAIYRNI

SEQ ID NO: 422 - protein, 14 aa, synthetic construct
GSGQNQQTSGTTNC

SEQ ID NO: 423 - protein, 14 aa, synthetic construct
GMTSHSVSGQNQQT

SEQ ID NO: 424 - protein, 14 aa, synthetic construct
GSSQSTGYQPNQQT

SEQ ID NO: 425 - protein, 14 aa, synthetic construct
GSLKPTTLGQNQQT

SEQ ID NO: 426 - protein, 14 aa, synthetic construct
GRMFSLGSGQNQQT

SEQ ID NO: 427 - protein, 14 aa, synthetic construct
GSGQNQQTALGVKC

SEQ ID NO: 428 - protein, 14 aa, synthetic construct
GAMVSHSSGQNQQT

SEQ ID NO: 429 - protein, 14 aa, synthetic construct
GSGQNQQRNSDSVT

SEQ ID NO: 430 - protein, 14 aa, synthetic construct
GSGQSMTLHLNQQT

SEQ ID NO: 431 - protein, 14 aa, synthetic construct
GSGQVHQAEVNQQT

SEQ ID NO: 432 - protein, 14 aa, synthetic construct
GSGQNQSQNHLQQT

SEQ ID NO: 433 - protein, 14 aa, synthetic construct
GSLLTTASGQNQQT

SEQ ID NO: 434 - protein, 14 aa, synthetic construct
GSGLIRTAAQNQQT

SEQ ID NO: 435 - protein, 14 aa, synthetic construct
GSGQNQQTVSRQST

SEQ ID NO: 436 - protein, 14 aa, synthetic construct
GSGQYANHGINQQT

SEQ ID NO: 437 - protein, 14 aa, synthetic construct
GSRSTGPSGQNQQT

SEQ ID NO: 438 - protein, 14 aa, synthetic construct
GRGVQQKLQQNQQT

SEQ ID NO: 439 - protein, 14 aa, synthetic construct
GSGQNQQVHLSTGT

SEQ ID NO: 440 - protein, 14 aa, synthetic construct
GSGQNQQLSAKSST

SEQ ID NO: 441 - protein, 14 aa, synthetic construct
GSGYKAARPQNQQT

SEQ ID NO: 442 - protein, 14 aa, synthetic construct
GSAGISPSGQNQQT

SEQ ID NO: 443 - protein, 14 aa, synthetic construct
GSGQNRAHAFLQQT

SEQ ID NO: 444 - protein, 14 aa, synthetic construct
GSGLSGITMQNQQT

SEQ ID NO: 445 - protein, 14 aa, synthetic construct
GPGSAHSSGQNQQT

SEQ ID NO: 446 - protein, 14 aa, synthetic construct
GSSHTQALGQNQQT

SEQ ID NO: 447 - protein, 14 aa, synthetic construct
GSGVHGVSSQNQQT

SEQ ID NO: 448 - protein, 14 aa, synthetic construct
GSSGRDMGGQNQQT

SEQ ID NO: 449 - protein, 14 aa, synthetic construct
GERAFPTSGQNQQT

SEQ ID NO: 450 - protein, 14 aa, synthetic construct
GGRIVSLSGQNQQT

SEQ ID NO: 451 - protein, 14 aa, synthetic construct
GSGQNSYSHTSQQT

SEQ ID NO: 452 - protein, 14 aa, synthetic construct
GLGYPGSSGQNQQT

SEQ ID NO: 453 - protein, 14 aa, synthetic construct
GSGPQSHTGQNQQT

SEQ ID NO: 454 - protein, 14 aa, synthetic construct
GSGQNQQLSRDAST

SEQ ID NO: 455 - protein, 14 aa, synthetic construct
GSGQILHSVPNQQT

SEQ ID NO: 456 - protein, 14 aa, synthetic construct
GSGFHTDSRQNQQT

SEQ ID NO: 457 - protein, 14 aa, synthetic construct
GSGQSHSLATNQQT

SEQ ID NO: 458 - protein, 14 aa, synthetic construct
GSGQNQQTLSKPWT

SEQ ID NO: 459 - protein, 14 aa, synthetic construct
GSGHAAISQQNQQT

SEQ ID NO: 460 - protein, 14 aa, synthetic construct
GSGQNQQQIGGNST

SEQ ID NO: 461 - protein, 14 aa, synthetic construct
GGGPMAGSGQNQQT

SEQ ID NO: 462 - protein, 14 aa, synthetic construct
GMRMEYQSGQNQQT

SEQ ID NO: 463 - protein, 14 aa, synthetic construct
GSGQNQQGTLLHQT

SEQ ID NO: 464 - protein, 14 aa, synthetic construct
GSGQNQRSSGGVQT

SEQ ID NO: 465 - protein, 14 aa, synthetic construct
GSGQNQRGALATQT

SEQ ID NO: 466 - protein, 14 aa, synthetic construct
GSGTVHAATQNQQT

SEQ ID NO: 467 - protein, 14 aa, synthetic construct
GSRMTQQFGQNQQT

SEQ ID NO: 468 - protein, 14 aa, synthetic construct
GSSSPGASGQNQQT

SEQ ID NO: 469 - protein, 14 aa, synthetic construct
GHPSPHVSGQNQQT

SEQ ID NO: 470 - protein, 14 aa, synthetic construct
GSGSHHASRQNQQT

SEQ ID NO: 471 - protein, 14 aa, synthetic construct
GAVGHSYSGQNQQT

SEQ ID NO: 472 - protein, 14 aa, synthetic construct
GSRSQYDIGQNQQT

SEQ ID NO: 473 - protein, 14 aa, synthetic construct
GSGQGPQERGNQQT

SEQ ID NO: 474 - protein, 14 aa, synthetic construct
GSIAHVGTGQNQQT

SEQ ID NO: 475 - protein, 14 aa, synthetic construct
GSGQNQQKQNHGNT

SEQ ID NO: 476 - protein, 14 aa, synthetic construct
GSGQNQQALGSQRT

SEQ ID NO: 477 - protein, 14 aa, synthetic construct
GSGAITHMPQNQQT

SEQ ID NO: 478 - protein, 14 aa, synthetic construct
GSGQRNPLLLNQQT

SEQ ID NO: 479 - protein, 14 aa, synthetic construct
GSSGIPVSHQNQQT

SEQ ID NO: 480 - protein, 14 aa, synthetic construct
GVHSLTPSGQNQQT

SEQ ID NO: 481 - protein, 14 aa, synthetic construct
GVIVLHGSGQNQQT

SEQ ID NO: 482 - protein, 14 aa, synthetic construct
GGTRVVDSGQNQQT

SEQ ID NO: 483 - protein, 14 aa, synthetic construct
GSGGVTYQSQNQQT

SEQ ID NO: 484 - protein, 14 aa, synthetic construct
GSGQNQAGHGPGQT

SEQ ID NO: 485 - protein, 14 aa, synthetic construct
GSGQLVTSGPNQQT

SEQ ID NO: 486 - protein, 14 aa, synthetic construct
GSGIAAQRTQNQQT

SEQ ID NO: 487 - protein, 14 aa, synthetic construct
GSTPAGVGGQNQQT

SEQ ID NO: 488 - protein, 14 aa, synthetic construct
GSGQNQQTSTGVHS

SEQ ID NO: 489 - protein, 14 aa, synthetic construct
GSGQIRQLVDNQQT

SEQ ID NO: 490 - protein, 14 aa, synthetic construct
GSLIGMQSGQNQQT

SEQ ID NO: 491 - protein, 14 aa, synthetic construct
GSGQIKGKMDNQQT

SEQ ID NO: 492 - protein, 14 aa, synthetic construct
GSGSDMSSWQNQQT

SEQ ID NO: 493 - protein, 14 aa, synthetic construct
GRGQNQQHTGLATT

SEQ ID NO: 494 - protein, 14 aa, synthetic construct
GSGQNQQTLYSSNT

SEQ ID NO: 495 - protein, 14 aa, synthetic construct
GSGQTQVLKSNQQT

SEQ ID NO: 496 - protein, 14 aa, synthetic construct
GSRTLSNVGQNQQT

SEQ ID NO: 497 - protein, 14 aa, synthetic construct
GSGVQHSLPQNQQT

SEQ ID NO: 498 - protein, 14 aa, synthetic construct
GNYLHQASGQNQQT

SEQ ID NO: 499 - protein, 14 aa, synthetic construct
GSGGTSVHQQNQQT

SEQ ID NO: 500 - protein, 14 aa, synthetic construct
GMDHSRPSGQNQQT

SEQ ID NO: 501 - protein, 14 aa, synthetic construct
GSGQNQQSMGTFTT

SEQ ID NO: 502 - protein, 14 aa, synthetic construct
GSGQNQQTPLRPPT

SEQ ID NO: 503 - protein, 14 aa, synthetic construct
GSGQNQHHSVSQQT

SEQ ID NO: 504 - protein, 14 aa, synthetic construct
GSGQLRSLSTNQQT

SEQ ID NO: 505 - protein, 14 aa, synthetic construct
GSGSPRQLSQNQQT

SEQ ID NO: 506 - protein, 14 aa, synthetic construct
GSGQNQQTTASSHT

SEQ ID NO: 507 - protein, 14 aa, synthetic construct
GRGQVVSTHQNQQT

SEQ ID NO: 508 - protein, 14 aa, synthetic construct
GSAQVSMVGQNQQT

SEQ ID NO: 509 - protein, 14 aa, synthetic construct
GSSTLVTIGKNQQT

SEQ ID NO: 510 - protein, 14 aa, synthetic construct
GFAHQASSGQNQQT

SEQ ID NO: 511 - protein, 14 aa, synthetic construct
GSGQPVLSISNQQT

SEQ ID NO: 512 - protein, 14 aa, synthetic construct
GSGQSHRSELNQQT

SEQ ID NO: 513 - protein, 14 aa, synthetic construct
GSSVGSPIGQNQQT

SEQ ID NO: 514 - protein, 14 aa, synthetic construct
GSGMPIRNVQNQQT

SEQ ID NO: 515 - protein, 14 aa, synthetic construct
GSSTRVDSGQNQQT

SEQ ID NO: 516 - protein, 14 aa, synthetic construct
GSGQNQQTAMRSTT

SEQ ID NO: 517 - protein, 14 aa, synthetic construct
GSGQNQQHSSSHLT

SEQ ID NO: 518 - protein, 14 aa, synthetic construct
GSRNGHAVGQNQQT

SEQ ID NO: 519 - protein, 14 aa, synthetic construct
GLGAYQSSGQNQQT

SEQ ID NO: 520 - protein, 14 aa, synthetic construct
GPGLSGHSGQNQQT

SEQ ID NO: 521 - protein, 14 aa, synthetic construct
GSTGIVSSGQNQQT

SEQ ID NO: 522 - protein, 14 aa, synthetic construct
GSRTTQVIGQNQQT

SEQ ID NO: 523 - protein, 14 aa, synthetic construct
GSGLLHRAQQNQQT

SEQ ID NO: 524 - protein, 14 aa, synthetic construct
GSGQNAQQAAAQQT

SEQ ID NO: 525 - protein, 14 aa, synthetic construct
GSGQNQQSALRTQT

SEQ ID NO: 526 - protein, 14 aa, synthetic construct
GSGFLSDTRQNQQT

SEQ ID NO: 527 - protein, 14 aa, synthetic construct
GSGLLYHDQQNQQT

SEQ ID NO: 528 - protein, 14 aa, synthetic construct
GSGQNQHYSLHKQT

SEQ ID NO: 529 - protein, 14 aa, synthetic construct
GSGHSPLPQQNQQT

SEQ ID NO: 530 - protein, 14 aa, synthetic construct
GNGHSMRPNQNQQT

SEQ ID NO: 531 - protein, 14 aa, synthetic construct
GSGLKWSTLQNQQT

SEQ ID NO: 532 - protein, 14 aa, synthetic construct
GSGQMGRQAVNQQT

SEQ ID NO: 533 - protein, 14 aa, synthetic construct
GSGQNQQTSGVLTL

SEQ ID NO: 534 - protein, 14 aa, synthetic construct
GSGQNQQALHNPHT

SEQ ID NO: 535 - protein, 14 aa, synthetic construct
GSGQNQQVIPNSKT

SEQ ID NO: 536 - protein, 14 aa, synthetic construct
GSPLQDRVGQNQQT

SEQ ID NO: 537 - protein, 14 aa, synthetic construct
GSGQNQYSSTNPQT

SEQ ID NO: 538 - protein, 14 aa, synthetic construct
GAMTVTISGQNQQT

SEQ ID NO: 539 - protein, 14 aa, synthetic construct
GSGQNQQLQTLIRT

SEQ ID NO: 540 - protein, 14 aa, synthetic construct
GSGLRQTSQQNQQT

SEQ ID NO: 541 - protein, 14 aa, synthetic construct
GSGQNQQTGLRQQT

SEQ ID NO: 542 - protein, 14 aa, synthetic construct
GSGQTRQMKDNQQT

SEQ ID NO: 543 - protein, 14 aa, synthetic construct
GSGQNHGLQSGQQT

SEQ ID NO: 544 - protein, 14 aa, synthetic construct
GSGQSHRQPENQQT

SEQ ID NO: 545 - protein, 14 aa, synthetic construct
GSGQDRHIVQNQQT

SEQ ID NO: 546 - protein, 14 aa, synthetic construct
GSGQNQQLPHSNLT

SEQ ID NO: 547 - protein, 14 aa, synthetic construct
GSGQLSVPYDNQQT

SEQ ID NO: 548 - protein, 14 aa, synthetic construct
GSGRNPQTQPLQQT

SEQ ID NO: 549 - protein, 14 aa, synthetic construct
GSGQPYSTGLNQQT

SEQ ID NO: 550 - protein, 14 aa, synthetic construct
GSGQNQQTHGGLRD

SEQ ID NO: 551 - protein, 14 aa, synthetic construct
GAYGMVSSGQNQQT

SEQ ID NO: 552 - protein, 14 aa, synthetic construct
GSGIQSSYSQNQQT

SEQ ID NO: 553 - protein, 14 aa, synthetic construct
GPRLSDQSGQNQQT

SEQ ID NO: 554 - protein, 14 aa, synthetic construct
GSGQNQQTHPSPCT

SEQ ID NO: 555 - protein, 14 aa, synthetic construct
GSGQSFQMHTNQQT

SEQ ID NO: 556 - protein, 14 aa, synthetic construct
GSGQNQQTGNPKHT

SEQ ID NO: 557 - protein, 14 aa, synthetic construct
GFSSAVHSGQNQQT

SEQ ID NO: 558 - protein, 14 aa, synthetic construct
GSGQNQQTSMSNAT

SEQ ID NO: 559 - protein, 14 aa, synthetic construct
GSGQDMKQHHNQQT

SEQ ID NO: 560 - protein, 14 aa, synthetic construct
GLRLSTPSGQNQQT

SEQ ID NO: 561 - protein, 14 aa, synthetic construct
GSGQNQQTSVYMNT

SEQ ID NO: 562 - protein, 14 aa, synthetic construct
GSGQNQYSQSSMQT

SEQ ID NO: 563 - protein, 14 aa, synthetic construct
GSGQNQQSMADHTT

SEQ ID NO: 564 - protein, 14 aa, synthetic construct
GWERSFVSGQNQQT

SEQ ID NO: 565 - protein, 14 aa, synthetic construct
GLLAGKSSGQNQQT

SEQ ID NO: 566 - protein, 14 aa, synthetic construct
GKSFVPQSGQNQQT

SEQ ID NO: 567 - protein, 14 aa, synthetic construct
GSGQMQSAGSNQQT

SEQ ID NO: 568 - protein, 14 aa, synthetic construct
GSDQNQRLTSSMQT

SEQ ID NO: 569 - protein, 14 aa, synthetic construct
GESRAVLSGQNQQT

SEQ ID NO: 570 - protein, 14 aa, synthetic construct
GSVFGVPSGQNQQT

SEQ ID NO: 571 - protein, 14 aa, synthetic construct
GSGLPDRNLQNQQT

SEQ ID NO: 572 - protein, 14 aa, synthetic construct
GSGTHNSAIQNQQT

SEQ ID NO: 573 - protein, 14 aa, synthetic construct
GSGMIIASMQNQQT

SEQ ID NO: 574 - protein, 14 aa, synthetic construct
GGITWTDSGQNQQT

SEQ ID NO: 575 - protein, 14 aa, synthetic construct
GSGQNQQASGRQQT

SEQ ID NO: 576 - protein, 14 aa, synthetic construct
GSGQNQQPHLKSLT

SEQ ID NO: 577 - protein, 14 aa, synthetic construct
GPPQHMTSGQNQQT

SEQ ID NO: 578 - protein, 14 aa, synthetic construct
GSGQNQQASLPSRT

SEQ ID NO: 579 - protein, 14 aa, synthetic construct
GSGQIVSTQTNQQT

SEQ ID NO: 580 - protein, 14 aa, synthetic construct
GSGKGHSAGQNQQT

SEQ ID NO: 581 - protein, 14 aa, synthetic construct
GSGQNTRLQLGQQT

SEQ ID NO: 582 - protein, 14 aa, synthetic construct
GSVGSRPVGQNQQT

SEQ ID NO: 583 - protein, 14 aa, synthetic construct
GSSHTLALGQNQQT

SEQ ID NO: 584 - protein, 14 aa, synthetic construct
GMYEYSQSGQNQQT

SEQ ID NO: 585 - protein, 14 aa, synthetic construct
GNGQNQQHSILHGT

SEQ ID NO: 586 - protein, 14 aa, synthetic construct
GSGYNQPHLQNQQT

SEQ ID NO: 587 - protein, 14 aa, synthetic construct
GPLVNASSGQNQQT

SEQ ID NO: 588 - protein, 14 aa, synthetic construct
GSGQNQQVLTTART

SEQ ID NO: 589 - protein, 14 aa, synthetic construct
GSGQNQHSVHNDQT

SEQ ID NO: 590 - protein, 14 aa, synthetic construct
GAGLIMHSGQNQQT

SEQ ID NO: 591 - protein, 14 aa, synthetic construct
GMGRHSASGQNQQT

SEQ ID NO: 592 - protein, 14 aa, synthetic construct
GSHSQSGHGQNQQT

SEQ ID NO: 593 - protein, 14 aa, synthetic construct
GSSTTIVSGQNHQT

SEQ ID NO: 594 - protein, 14 aa, synthetic construct
GRHLVTASGQNQQT

SEQ ID NO: 595 - protein, 14 aa, synthetic construct
GSGQNQQHANLNQT

SEQ ID NO: 596 - protein, 14 aa, synthetic construct
GSGSTHSKAQNQQT

SEQ ID NO: 597 - protein, 14 aa, synthetic construct
GSGQNKQMLSGNTT

SEQ ID NO: 598 - protein, 14 aa, synthetic construct
GSGQVHNPTQNQQT

SEQ ID NO: 599 - protein, 14 aa, synthetic construct
GSGQNQQIPHVHQT

SEQ ID NO: 600 - protein, 14 aa, synthetic construct
GSLHAGLSGQNQQT

SEQ ID NO: 601 - protein, 14 aa, synthetic construct
GPAQHGTSGQNQQT

SEQ ID NO: 602 - protein, 14 aa, synthetic construct
GEKAVTSSGQNQQT

SEQ ID NO: 603 - protein, 14 aa, synthetic construct
GSGQNQQTMANGQR

SEQ ID NO: 604 - protein, 14 aa, synthetic construct
GSGSPHSKDQNQQT

SEQ ID NO: 605 - protein, 14 aa, synthetic construct
GSFSMGYGGQNQQT

SEQ ID NO: 606 - protein, 14 aa, synthetic construct
GSGTHLVSLQNQQT

SEQ ID NO: 607 - protein, 14 aa, synthetic construct
GSGQMQPHVQNQQT

SEQ ID NO: 608 - protein, 14 aa, synthetic construct
GSGQNQQVAGLNNT

SEQ ID NO: 609 - protein, 14 aa, synthetic construct
GSSQNQQHDMRLRT

SEQ ID NO: 610 - protein, 14 aa, synthetic construct
GPASLPISGQNQQT

SEQ ID NO: 611 - protein, 14 aa, synthetic construct
GSGQNQQPPLATRT

SEQ ID NO: 612 - protein, 14 aa, synthetic construct
GSSRVPVSGQNQQT

SEQ ID NO: 613 - protein, 14 aa, synthetic construct
GSGQNQQTNLGHTT

SEQ ID NO: 614 - protein, 14 aa, synthetic construct
GSGQNQQLVSRVQT

SEQ ID NO: 615 - protein, 14 aa, synthetic construct
GPNSYPVSGQKQQT

SEQ ID NO: 616 - protein, 14 aa, synthetic construct
GHAHYQASGQNQQT

SEQ ID NO: 617 - protein, 14 aa, synthetic construct
GSGQALLSTGNQQT

SEQ ID NO: 618 - protein, 14 aa, synthetic construct
GSGQLPRQMTNQQT

SEQ ID NO: 619 - protein, 14 aa, synthetic construct
GSGFPKSTEQNQQT

SEQ ID NO: 620 - protein, 14 aa, synthetic construct
GSRETSLSGQNQQT

SEQ ID NO: 621 - protein, 14 aa, synthetic construct
GSGQNQQGTGVSHT

SEQ ID NO: 622 - protein, 14 aa, synthetic construct
GSRTVPVYGQNQQT

SEQ ID NO: 623 - protein, 14 aa, synthetic construct
GSNAQSAHGQNQQT

SEQ ID NO: 624 - protein, 14 aa, synthetic construct
GAFHLAASGQNQQT

SEQ ID NO: 625 - protein, 14 aa, synthetic construct
GSGQYRSSSDNQQT

SEQ ID NO: 626 - protein, 14 aa, synthetic construct
GSGQVYISTPNQQT

SEQ ID NO: 627 - protein, 14 aa, synthetic construct
GSGVSTQLLQNQQT

SEQ ID NO: 628 - protein, 14 aa, synthetic construct
GSGQLGLSVTNQQT

SEQ ID NO: 629 - protein, 14 aa, synthetic construct
GSGSNMRLSQNQQT

SEQ ID NO: 630 - protein, 14 aa, synthetic construct
GSGQNLHSGLPQQT

SEQ ID NO: 631 - protein, 14 aa, synthetic construct
GSSHTLALGQNKQT

SEQ ID NO: 632 - protein, 14 aa, synthetic construct
GSGQNQHSLPAHRT

SEQ ID NO: 633 - protein, 14 aa, synthetic construct
GSGQNQGTVYPNQT

SEQ ID NO: 634 - protein, 14 aa, synthetic construct
GSGQNQQPSLRQST

SEQ ID NO: 635 - protein, 14 aa, synthetic construct
GSGQNARLKDNQQT

SEQ ID NO: 636 - protein, 14 aa, synthetic construct
GHAGSTGSGQNQQT

SEQ ID NO: 637 - protein, 14 aa, synthetic construct
GSGQALSSSGNQQT

SEQ ID NO: 638 - protein, 14 aa, synthetic construct
GSGASESHRQNQQT

SEQ ID NO: 639 - protein, 14 aa, synthetic construct
GVGVITSSGQNQQT

SEQ ID NO: 640 - protein, 14 aa, synthetic construct
GSLYGQSLGQNQQT

SEQ ID NO: 641 - protein, 14 aa, synthetic construct
GSGQMSDVHGNQQT

SEQ ID NO: 642 - protein, 14 aa, synthetic construct
GSGQNQQHSSKATT

SEQ ID NO: 643 - protein, 14 aa, synthetic construct
GSGQNQQTSVSQQT

SEQ ID NO: 644 - protein, 14 aa, synthetic construct
GSGQKMWKLDNQQT

SEQ ID NO: 645 - protein, 14 aa, synthetic construct
GSGQNVSMQVNQQT

SEQ ID NO: 646 - protein, 14 aa, synthetic construct
GSGQNQRATLSNQT

SEQ ID NO: 647 - protein, 14 aa, synthetic construct
GSGQASSKSANQQT

SEQ ID NO: 648 - protein, 14 aa, synthetic construct
GSGKNQTPIPKGQT

SEQ ID NO: 649 - protein, 14 aa, synthetic construct
GSGQNQQTRQEGST

SEQ ID NO: 650 - protein, 14 aa, synthetic construct
GASSLATSGQNQQT

SEQ ID NO: 651 - protein, 14 aa, synthetic construct
GSGQRGSLTENQQT

SEQ ID NO: 652 - protein, 14 aa, synthetic construct
GSEQTRQRGQNQQT

SEQ ID NO: 653 - protein, 14 aa, synthetic construct
GSGQNQQTLTASKE

SEQ ID NO: 654 - protein, 14 aa, synthetic construct
GSGTSGKTGKNQQT

SEQ ID NO: 655 - protein, 14 aa, synthetic construct
GQLVTFTSGQNQQT

SEQ ID NO: 656 - protein, 14 aa, synthetic construct
GSGQNQQSANKILT

SEQ ID NO: 657 - protein, 14 aa, synthetic construct
GSGQNQQHHSSHTT

SEQ ID NO: 658 - protein, 14 aa, synthetic construct
GSGQNQKGMQPNQT

SEQ ID NO: 659 - protein, 14 aa, synthetic construct
GSGQLVSGLYNQQT

SEQ ID NO: 660 - protein, 14 aa, synthetic construct
GSSVGVPSGQNQQT

SEQ ID NO: 661 - protein, 14 aa, synthetic construct
GSGQNQQWDSRRQT

SEQ ID NO: 662 - protein, 14 aa, synthetic construct
GSEQTRQSGQNQQT

SEQ ID NO: 663 - protein, 14 aa, synthetic construct
GSGIGSHIPQNQQT

SEQ ID NO: 664 - protein, 14 aa, synthetic construct
GSGQNQRLHGVDQT

SEQ ID NO: 665 - protein, 14 aa, synthetic construct
GEVSRVLSGQNQQT

SEQ ID NO: 666 - protein, 14 aa, synthetic construct
GSGQNQQKVSPLLT

SEQ ID NO: 667 - protein, 14 aa, synthetic construct
GSGLALERSQNQQT

SEQ ID NO: 668 - protein, 14 aa, synthetic construct
GPDRIGSSGQNQQT

SEQ ID NO: 669 - protein, 14 aa, synthetic construct
GSGQNQDHQNKQQT

SEQ ID NO: 670 - protein, 14 aa, synthetic construct
GSGQNQQTALYNNT

SEQ ID NO: 671 - protein, 14 aa, synthetic construct
GSGAVHLTAQNQQT

SEQ ID NO: 672 - protein, 14 aa, synthetic construct
GSLVSTQSGQNQQT

SEQ ID NO: 673 - protein, 14 aa, synthetic construct
GSGVSARMVQNQQT

SEQ ID NO: 674 - protein, 14 aa, synthetic construct
GSGQTRMPLANQQT

SEQ ID NO: 675 - protein, 14 aa, synthetic construct
GSGISSRNMQNQQT

SEQ ID NO: 676 - protein, 14 aa, synthetic construct
GSGEKVHSGQNQQT

SEQ ID NO: 677 - protein, 14 aa, synthetic construct
GSGQNQQKLSSMST

SEQ ID NO: 678 - protein, 14 aa, synthetic construct
GSGQNQQTGQHMRV

SEQ ID NO: 679 - protein, 14 aa, synthetic construct
GSGMIHTTAQNQQT

SEQ ID NO: 680 - protein, 14 aa, synthetic construct
GSGQNWPALKGQQT

SEQ ID NO: 681 - protein, 14 aa, synthetic construct
GASHMSISGQNQQT

SEQ ID NO: 682 - protein, 14 aa, synthetic construct
GSDQNQQLGYSKQT

SEQ ID NO: 683 - protein, 14 aa, synthetic construct
GIPSIRESGQNQQT

SEQ ID NO: 684 - protein, 14 aa, synthetic construct
GSGIPSVKFQNQQT

SEQ ID NO: 685 - protein, 14 aa, synthetic construct
GSGQNQQTSVSQNV

SEQ ID NO: 686 - protein, 14 aa, synthetic construct
GSGQNQQIGESRMT

SEQ ID NO: 687 - protein, 14 aa, synthetic construct
GSGSSSMSFQNQQT

SEQ ID NO: 688 - protein, 14 aa, synthetic construct
GSGQKQERAVSKQT

SEQ ID NO: 689 - protein, 14 aa, synthetic construct
GCTTRLNSGQNQQT

SEQ ID NO: 690 - protein, 14 aa, synthetic construct
GSGQNQQIISTKIT

SEQ ID NO: 691 - protein, 14 aa, synthetic construct
GSGQNQQKSLNGNT

SEQ ID NO: 692 - protein, 14 aa, synthetic construct
GSGIPAPRLQNQQT

SEQ ID NO: 693 - protein, 14 aa, synthetic construct
GSGQIRESMGNQQT

SEQ ID NO: 694 - protein, 14 aa, synthetic construct
GSGQNSGVHFNQQT

SEQ ID NO: 695 - protein, 14 aa, synthetic construct
GSGQNIGHSLPQQT

SEQ ID NO: 696 - protein, 14 aa, synthetic construct
GSGERSISVQNQQT

SEQ ID NO: 697 - protein, 14 aa, synthetic construct
GSGLKPNVLQNQQT

SEQ ID NO: 698 - protein, 14 aa, synthetic construct
GSGQVAYAQGNQQT

SEQ ID NO: 699 - protein, 14 aa, synthetic construct
GSGQSSYGSGNQQT

SEQ ID NO: 700 - protein, 14 aa, synthetic construct
GSGQNQAMTHGDQT

SEQ ID NO: 701 - protein, 14 aa, synthetic construct
GSGQNQALVSMGQT

SEQ ID NO: 702 - protein, 14 aa, synthetic construct
GSGQNPSFMRGQQT

SEQ ID NO: 703 - protein, 14 aa, synthetic construct
GSGQNQQSHLRTNT

SEQ ID NO: 704 - protein, 14 aa, synthetic construct
GYTRLETSGQNQQT

SEQ ID NO: 705 - protein, 14 aa, synthetic construct
GSGQSYDMRGNQQT

SEQ ID NO: 706 - protein, 14 aa, synthetic construct
GSRTTQDIGQNQQT

SEQ ID NO: 707 - protein, 14 aa, synthetic construct
GSGHPYKAAQNQQT

SEQ ID NO: 708 - protein, 14 aa, synthetic construct
GRLSNAHGGQNQQT

SEQ ID NO: 709 - protein, 14 aa, synthetic construct
GSGQNQRAVLNDQT

SEQ ID NO: 710 - protein, 14 aa, synthetic construct
GGSHTYGGGQNQQT

SEQ ID NO: 711 - protein, 14 aa, synthetic construct
GSSVNSMIGQNQQT

SEQ ID NO: 712 - protein, 14 aa, synthetic construct
GNSSMMGSGQNQQT

SEQ ID NO: 713 - protein, 14 aa, synthetic construct
GNRDRPSSGQNQQT

SEQ ID NO: 714 - protein, 14 aa, synthetic construct
GSGNMHASRQNQQT

SEQ ID NO: 715 - protein, 14 aa, synthetic construct
GFIFPKVSGQNQQT

SEQ ID NO: 716 - protein, 14 aa, synthetic construct
GSGQNQQLKNSTST

SEQ ID NO: 717 - protein, 14 aa, synthetic construct
GSGQNQQSQYMPRT

SEQ ID NO: 718 - protein, 14 aa, synthetic construct
GSGQRMADIGNQQT

SEQ ID NO: 719 - protein, 14 aa, synthetic construct
GSGQNQSHYPSQQT

SEQ ID NO: 720 - protein, 14 aa, synthetic construct
GSDGKMHRGQNQQT

SEQ ID NO: 721 - protein, 14 aa, synthetic construct
GSGSVGFIGQNQQT

SEQ ID NO: 722 - protein, 14 aa, synthetic construct
GLHGMTLSGQNQQT

SEQ ID NO: 723 - protein, 14 aa, synthetic construct
GSDQSKRGDSNQQT

SEQ ID NO: 724 - protein, 14 aa, synthetic construct
GSLFLATGGQNQQT

SEQ ID NO: 725 - protein, 14 aa, synthetic construct
GSGQNQQPSAFSKT

SEQ ID NO: 726 - protein, 14 aa, synthetic construct
GSGQLPQSGLNQQT

SEQ ID NO: 727 - protein, 14 aa, synthetic construct
GSGSKQNALQNQQT

SEQ ID NO: 728 - protein, 14 aa, synthetic construct
GSGQRRELSQNQQT

SEQ ID NO: 729 - protein, 14 aa, synthetic construct
GSGQREPKASNQQT

SEQ ID NO: 730 - protein, 14 aa, synthetic construct
GSGQNQQHPSTQQT

SEQ ID NO: 731 - protein, 14 aa, synthetic construct
GSQSTLGLGQNQQT

SEQ ID NO: 732 - protein, 14 aa, synthetic construct
GSGQNQQMPGLSST

SEQ ID NO: 733 - protein, 14 aa, synthetic construct
GSGQNQQTVGGKNL

SEQ ID NO: 734 - protein, 14 aa, synthetic construct
GSSREFHSGQNQQT

SEQ ID NO: 735 - protein, 14 aa, synthetic construct
GSGQNQQTVPSNLV

SEQ ID NO: 736 - protein, 14 aa, synthetic construct
GSGQNAYSSQAQQT

SEQ ID NO: 737 - protein, 14 aa, synthetic construct
GSGQNKDHSTRRQT

SEQ ID NO: 738 - protein, 14 aa, synthetic construct
GQLGSVGSGQDQQT

SEQ ID NO: 739 - protein, 14 aa, synthetic construct
GSGQHAAPGHNQQT

SEQ ID NO: 740 - protein, 14 aa, synthetic construct
GSGQNQQTSQSPPT

SEQ ID NO: 741 - protein, 14 aa, synthetic construct
GSGNYRDHEQNQQT

SEQ ID NO: 742 - protein, 14 aa, synthetic construct
GSGQHSNQHVNQQT

SEQ ID NO: 743 - protein, 14 aa, synthetic construct
GSGQTARNGINQQT

SEQ ID NO: 744 - protein, 14 aa, synthetic construct
GSGQNQQHYGSQGT

SEQ ID NO: 745 - protein, 14 aa, synthetic construct
GSGSPQASRQNQQT

SEQ ID NO: 746 - protein, 14 aa, synthetic construct
GSGFSHSMGKNQQT

SEQ ID NO: 747 - protein, 14 aa, synthetic construct
GSGQSHSLETNQQT

SEQ ID NO: 748 - protein, 14 aa, synthetic construct
GTEQTRQSGQNQQT

SEQ ID NO: 749 - protein, 14 aa, synthetic construct
GSGRHLASVQNQQT

SEQ ID NO: 750 - protein, 14 aa, synthetic construct
GLGSKNHSGQNQQT

SEQ ID NO: 751 - protein, 14 aa, synthetic construct
GSGQNQQTSHFPSA

SEQ ID NO: 752 - protein, 14 aa, synthetic construct
GSGQLSGTPQNQQT

SEQ ID NO: 753 - protein, 14 aa, synthetic construct
GSGQNQQAPHKKET

SEQ ID NO: 754 - protein, 14 aa, synthetic construct
GSGQNQQTLRGSLE

SEQ ID NO: 755 - protein, 14 aa, synthetic construct
GSIAMTSHGQNQQT

SEQ ID NO: 756 - protein, 14 aa, synthetic construct
GSPGVSPSGQNQQT

SEQ ID NO: 757 - protein, 14 aa, synthetic construct
GSGQNQQTGSSSRV

SEQ ID NO: 758 - protein, 14 aa, synthetic construct
GSGQHLPLLGNQQT

SEQ ID NO: 759 - protein, 14 aa, synthetic construct
GSDHSHRGGQNQQT

SEQ ID NO: 760 - protein, 14 aa, synthetic construct
GSGIVTKLGQNQQT

SEQ ID NO: 761 - protein, 14 aa, synthetic construct
GSGQDVTKTGNQQT

SEQ ID NO: 762 - protein, 14 aa, synthetic construct
GSGQNQQSHGRIGT

SEQ ID NO: 763 - protein, 14 aa, synthetic construct
GSGQNQQINHRSPT

SEQ ID NO: 764 - protein, 14 aa, synthetic construct
GSGDDSRVGQNQQT

SEQ ID NO: 765 - protein, 14 aa, synthetic construct
GSGQSTLKRINQQT

SEQ ID NO: 766 - protein, 14 aa, synthetic construct
GSGSQHSKAQNQQT

SEQ ID NO: 767 - protein, 14 aa, synthetic construct
GSGQNQQHASSNNT

SEQ ID NO: 768 - protein, 14 aa, synthetic construct
GSRTYQVSGQNQQT

SEQ ID NO: 769 - protein, 14 aa, synthetic construct
GSGQNQGLLSSPQT

SEQ ID NO: 770 - protein, 14 aa, synthetic construct
GSGGGLQHNQNQQT

SEQ ID NO: 771 - protein, 14 aa, synthetic construct
GSGQNQQTTAATRM

SEQ ID NO: 772 - protein, 14 aa, synthetic construct
GSGQNQRASILVQT

SEQ ID NO: 773 - protein, 14 aa, synthetic construct
GSGQNLGLLGAQQT

SEQ ID NO: 774 - protein, 14 aa, synthetic construct
GSLDLGRSGQNQQT

SEQ ID NO: 775 - protein, 14 aa, synthetic construct
GNSQVKVSGQNQQT

SEQ ID NO: 776 - protein, 14 aa, synthetic construct
GSSGSHQYGQNQQT

SEQ ID NO: 777 - protein, 14 aa, synthetic construct
GSGQNQQQRDGTLT

SEQ ID NO: 778 - protein, 14 aa, synthetic construct
GRGQHVSVANNQQT

SEQ ID NO: 779 - protein, 14 aa, synthetic construct
GDSSSRISGQNQQT

SEQ ID NO: 780 - protein, 14 aa, synthetic construct
GSGQNQQHSLSSQT

SEQ ID NO: 781 - protein, 14 aa, synthetic construct
GSLMDVHRGQNQQT

SEQ ID NO: 782 - protein, 14 aa, synthetic construct
GSIQYQSSGQNQQT

SEQ ID NO: 783 - protein, 14 aa, synthetic construct
GLGSKNPSGQNQQT

SEQ ID NO: 784 - protein, 14 aa, synthetic construct
GSGQLVLTLQNQQT

SEQ ID NO: 785 - protein, 14 aa, synthetic construct
GSGQNQQTSQPLPG

SEQ ID NO: 786 - protein, 14 aa, synthetic construct
GSGQNQQNLGKLNT

SEQ ID NO: 787 - protein, 14 aa, synthetic construct
GTTAHQPSGQNQQT

SEQ ID NO: 788 - protein, 14 aa, synthetic construct
GSGQNRAQIGTQQT

SEQ ID NO: 789 - protein, 14 aa, synthetic construct
GSGQYVHVSSNQQT

SEQ ID NO: 790 - protein, 14 aa, synthetic construct
GSGQNQQTAHAFNI

SEQ ID NO: 791 - protein, 14 aa, synthetic construct
GSGQNQRTMVATQT

SEQ ID NO: 792 - protein, 14 aa, synthetic construct
GSGQNPIRGAMQQT

SEQ ID NO: 793 - protein, 14 aa, synthetic construct
GSGYVITGSQNQQT

SEQ ID NO: 794 - protein, 14 aa, synthetic construct
GRGPKQSNIQNQQT

SEQ ID NO: 795 - protein, 14 aa, synthetic construct
GSGQNQQTMLGKPC

SEQ ID NO: 796 - protein, 14 aa, synthetic construct
GSGQNQQVGSTVRT

SEQ ID NO: 797 - protein, 14 aa, synthetic construct
GNVTTQKSGQNQQT

SEQ ID NO: 798 - protein, 14 aa, synthetic construct
GSGNPVSHLQNQQT

SEQ ID NO: 799 - protein, 14 aa, synthetic construct
GSLSHMESGQNQQT

SEQ ID NO: 800 - protein, 14 aa, synthetic construct
GRAPTNLSGQNQQT

SEQ ID NO: 801 - protein, 14 aa, synthetic construct
GSGQNQQTVMTARA

SEQ ID NO: 802 - protein, 14 aa, synthetic construct
GSGMPASRLQNQQT

SEQ ID NO: 803 - protein, 14 aa, synthetic construct
GVVRNHQSGQNQQT

SEQ ID NO: 804 - protein, 14 aa, synthetic construct
GSGQNQHSVQVRQT

SEQ ID NO: 805 - protein, 14 aa, synthetic construct
GSGQNTGHLTMQQT

SEQ ID NO: 806 - protein, 14 aa, synthetic construct
GSGQNQQYAGKILT

SEQ ID NO: 807 - protein, 14 aa, synthetic construct
GSGNPHVRNQNQQT

SEQ ID NO: 808 - protein, 14 aa, synthetic construct
GSGQNGGSSNRQQT

SEQ ID NO: 809 - protein, 14 aa, synthetic construct
GSGQRLSQGVNHQT

SEQ ID NO: 810 - protein, 14 aa, synthetic construct
GSGQNAHAKEGQQT

SEQ ID NO: 811 - protein, 14 aa, synthetic construct
GSSPAPNSGQNQQT

SEQ ID NO: 812 - protein, 14 aa, synthetic construct
GLAHKTSSGQNQQT

SEQ ID NO: 813 - protein, 14 aa, synthetic construct
GSGQNQQTPGAHKT

SEQ ID NO: 814 - protein, 14 aa, synthetic construct
GSGQNQQSLSGSFT

SEQ ID NO: 815 - protein, 14 aa, synthetic construct
GSGQNQQSTGTSRT

SEQ ID NO: 816 - protein, 14 aa, synthetic construct
GSGQNQQTVQSNLV

SEQ ID NO: 817 - protein, 14 aa, synthetic construct
GSGQNQQLGSRQCT

SEQ ID NO: 818 - protein, 14 aa, synthetic construct
GSGQNQYLRLELQT

SEQ ID NO: 819 - protein, 14 aa, synthetic construct
GSGQNQQTSPRLQT

SEQ ID NO: 820 - protein, 14 aa, synthetic construct
GSGQNQQTTSSNMT

SEQ ID NO: 821 - protein, 14 aa, synthetic construct
GTASTYNSGQNQQT

SEQ ID NO: 822 - protein, 14 aa, synthetic construct
GSGQNQQTMPQHKI

SEQ ID NO: 823 - protein, 14 aa, synthetic construct
GSGQSHLHTGNQQT

SEQ ID NO: 824 - protein, 14 aa, synthetic construct
GVKGVGHSGQNQQT

SEQ ID NO: 825 - protein, 14 aa, synthetic construct
GSGKVTKQSQNQQT

SEQ ID NO: 826 - protein, 14 aa, synthetic construct
GSGQNQQTALEKSL

SEQ ID NO: 827 - protein, 14 aa, synthetic construct
GSGYKDTYGQNQQT

SEQ ID NO: 828 - protein, 14 aa, synthetic construct
GSGQNQQSGTFLST

SEQ ID NO: 829 - protein, 14 aa, synthetic construct
GSGQNTGQHMMQQT

SEQ ID NO: 830 - protein, 14 aa, synthetic construct
GSGKNQQRPGLDQT

SEQ ID NO: 831 - protein, 14 aa, synthetic construct
GSGQSREISLNQQT

SEQ ID NO: 832 - protein, 14 aa, synthetic construct
GTPTSPSSGQNQQT

SEQ ID NO: 833 - protein, 14 aa, synthetic construct
GKPAGGLSGQNQQT

SEQ ID NO: 834 - protein, 14 aa, synthetic construct
GSGQNHRSADMQQT

SEQ ID NO: 835 - protein, 14 aa, synthetic construct
GSGQNQQTLPSLSL

SEQ ID NO: 836 - protein, 14 aa, synthetic construct
GSPYMGATGQNQQT

SEQ ID NO: 837 - protein, 14 aa, synthetic construct
GSGHAKAVGQNQQT

SEQ ID NO: 838 - protein, 14 aa, synthetic construct
GHMKGVTSGQNQQT

SEQ ID NO: 839 - protein, 14 aa, synthetic construct
GSGQNQKILTLDQT

SEQ ID NO: 840 - protein, 14 aa, synthetic construct
GSGQNQQTKVGHSA

SEQ ID NO: 841 - protein, 14 aa, synthetic construct
GIARTTISGQNQQT

SEQ ID NO: 842 - protein, 14 aa, synthetic construct
GSGQNQQTSVGFRT

SEQ ID NO: 843 - protein, 14 aa, synthetic construct
GSGQNQQTMIANIR

SEQ ID NO: 844 - protein, 14 aa, synthetic construct
GDMTRSSSGQNQQT

SEQ ID NO: 845 - protein, 14 aa, synthetic construct
GSGHMSDLRQNQQT

SEQ ID NO: 846 - protein, 14 aa, synthetic construct
GRGAVMASGQNQQT

SEQ ID NO: 847 - protein, 14 aa, synthetic construct
GSGQNQQLSGKSVT

SEQ ID NO: 848 - protein, 14 aa, synthetic construct
GSHTLVVSGQNQQT

SEQ ID NO: 849 - protein, 14 aa, synthetic construct
GSGPWSAGLQNQQT

SEQ ID NO: 850 - protein, 14 aa, synthetic construct
GSGQHSPHALNQQT

SEQ ID NO: 851 - protein, 14 aa, synthetic construct
GSGQNQQPNSGSMT

SEQ ID NO: 852 - protein, 14 aa, synthetic construct
GSGLAHLGGQNQQT

SEQ ID NO: 853 - protein, 14 aa, synthetic construct
GSSVRYEPKQNQQT

SEQ ID NO: 854 - protein, 14 aa, synthetic construct
GSGQNQQARPLELT

SEQ ID NO: 855 - protein, 14 aa, synthetic construct
GSGQPRSTGINQQT

SEQ ID NO: 856 - protein, 14 aa, synthetic construct
GSGQNQANWVKVQT

SEQ ID NO: 857 - protein, 14 aa, synthetic construct
GSGHLFQSGQNQQT

SEQ ID NO: 858 - protein, 14 aa, synthetic construct
GSGQNRGISISQQT

SEQ ID NO: 859 - protein, 14 aa, synthetic construct
GSGTHYDNRQNQQT

SEQ ID NO: 860 - protein, 14 aa, synthetic construct
GSGQNQQTSTTPLP

SEQ ID NO: 861 - protein, 14 aa, synthetic construct
GSGQVHASQVNQKT

SEQ ID NO: 862 - protein, 14 aa, synthetic construct
GSSGHRESGQNQQT

SEQ ID NO: 863 - protein, 14 aa, synthetic construct
GLSAEKSSGQNQQT

SEQ ID NO: 864 - protein, 14 aa, synthetic construct
GSGQEHRSLANQQT

SEQ ID NO: 865 - protein, 14 aa, synthetic construct
GSGQTVVRIANQQT

SEQ ID NO: 866 - protein, 14 aa, synthetic construct
GSGQNVSSVHRQQT

SEQ ID NO: 867 - protein, 14 aa, synthetic construct
GSGASRMSIQNQQT

SEQ ID NO: 868 - protein, 14 aa, synthetic construct
GVAFIGSSGQNQQT

SEQ ID NO: 869 - protein, 14 aa, synthetic construct
GSGQNQQTVPTRQT

SEQ ID NO: 870 - protein, 14 aa, synthetic construct
GSGQAAKSSQNQQT

SEQ ID NO: 871 - protein, 14 aa, synthetic construct
GSGQNQQVAIRTST

SEQ ID NO: 872 - protein, 14 aa, synthetic construct
GSVHMQNAGQNQQT

SEQ ID NO: 873 - protein, 14 aa, synthetic construct
GSGMRQAGVQNQQT

SEQ ID NO: 874 - protein, 14 aa, synthetic construct
GSGQNQQVGGKTVT

SEQ ID NO: 875 - protein, 14 aa, synthetic construct
GVHDMRVSGQNQQT

SEQ ID NO: 876 - protein, 14 aa, synthetic construct
GSGQHVSVANNQQT

SEQ ID NO: 877 - protein, 14 aa, synthetic construct
GSAAMSVRGQNQQT

SEQ ID NO: 878 - protein, 14 aa, synthetic construct
GVSRGGPSGQNQQT

SEQ ID NO: 879 - protein, 14 aa, synthetic construct
GSGQMVHTIGNQQT

SEQ ID NO: 880 - protein, 14 aa, synthetic construct
GRGGSMAETQNQQT

SEQ ID NO: 881 - protein, 14 aa, synthetic construct
GSGHTNPTRQNQQT

SEQ ID NO: 882 - protein, 14 aa, synthetic construct
GSGEAARYEQNQQT

SEQ ID NO: 883 - protein, 14 aa, synthetic construct
GSGQNERHLVLQQT

SEQ ID NO: 884 - protein, 14 aa, synthetic construct
GSGQNQQSKQQVLT

SEQ ID NO: 885 - protein, 14 aa, synthetic construct
GSGQARAHRGNQQT

SEQ ID NO: 886 - protein, 14 aa, synthetic construct
GSGQNQQPLDTSRT

SEQ ID NO: 887 - protein, 14 aa, synthetic construct
GSGQNQQLANMVTT

SEQ ID NO: 888 - protein, 14 aa, synthetic construct
GSGQMKDLHRNQQT

SEQ ID NO: 889 - protein, 14 aa, synthetic construct
GSGQNQHLSSFVQT

SEQ ID NO: 890 - protein, 14 aa, synthetic construct
GSGQNQQPSSRVTT

SEQ ID NO: 891 - protein, 14 aa, synthetic construct
GSGQNQQLAITLGT

SEQ ID NO: 892 - protein, 14 aa, synthetic construct
GSGQNQQTVGNPAT

SEQ ID NO: 893 - protein, 14 aa, synthetic construct
GSGQNQGRAHPMQT

SEQ ID NO: 894 - protein, 14 aa, synthetic construct
GSGQLIASVVNQQT

SEQ ID NO: 895 - protein, 14 aa, synthetic construct
GSSVRSLVGQNQQT

SEQ ID NO: 896 - protein, 14 aa, synthetic construct
GGAGSAHSGQNQQT

SEQ ID NO: 897 - protein, 14 aa, synthetic construct
GSDQNQQTMSSTRT

SEQ ID NO: 898 - protein, 14 aa, synthetic construct
GSGQNQQMAGAFRT

SEQ ID NO: 899 - protein, 14 aa, synthetic construct
GSLGNLQRGQNQQT

SEQ ID NO: 900 - protein, 14 aa, synthetic construct
GSGPSISHGQNQQT

SEQ ID NO: 901 - protein, 14 aa, synthetic construct
GSGQNQQSSFNVQT

SEQ ID NO: 902 - protein, 14 aa, synthetic construct
GSGQNQQTGQATHN

SEQ ID NO: 903 - protein, 14 aa, synthetic construct
VSGSPHSKAQNQQT

SEQ ID NO: 904 - protein, 14 aa, synthetic construct
CSGSPHSKAQNQQT

SEQ ID NO: 905 - protein, 14 aa, synthetic construct
GSGSPHRKAQNQQT

SEQ ID NO: 906 - protein, 14 aa, synthetic construct
GRGSPHSKAQNQQT

SEQ ID NO: 907 - protein, 14 aa, synthetic construct
GSGSPHSKAQNKQT

SEQ ID NO: 908 - protein, 14 aa, synthetic construct
GSGSPHSKAQTQQT

SEQ ID NO: 909 - protein, 14 aa, synthetic construct
GSGSTHASRQNQQT

SEQ ID NO: 910 - protein, 14 aa, synthetic construct
GSGSPHKYGQNQQT

SEQ ID NO: 911 - protein, 14 aa, synthetic construct
GSGSPHKFGQNQQT

SEQ ID NO: 912 - protein, 14 aa, synthetic construct
VSGSPHKFGQNQQT

SEQ ID NO: 913 - protein, 14 aa, synthetic construct
GSGSPHSKAQNHQT

SEQ ID NO: 914 - protein, 14 aa, synthetic construct
GSGSPHSKAQHQQT

SEQ ID NO: 915 - protein, 14 aa, synthetic construct
GSGSPHKTYQNQQT

SEQ ID NO: 916 - protein, 14 aa, synthetic construct
VSGSPHASRQNQQT

SEQ ID NO: 917 - protein, 14 aa, synthetic construct
GSGSPHKFGKNQQT

SEQ ID NO: 918 - protein, 14 aa, synthetic construct
GSGSPHASRQNQHT

SEQ ID NO: 919 - protein, 14 aa, synthetic construct
GSHSPHKSGQNQQT

SEQ ID NO: 920 - protein, 14 aa, synthetic construct
GSGQNQQRRMSPST

SEQ ID NO: 921 - protein, 14 aa, synthetic construct
GSGSPHSKPQNQQT

SEQ ID NO: 922 - protein, 14 aa, synthetic construct
GSGSPHKFGQKQQT

SEQ ID NO: 923 - protein, 14 aa, synthetic construct
VSGSPHGARQNQQT

SEQ ID NO: 924 - protein, 14 aa, synthetic construct
GSGSPHSKAQKQQT

SEQ ID NO: 925 - protein, 14 aa, synthetic construct
GSHSPHKRGQNQQT

SEQ ID NO: 926 - protein, 14 aa, synthetic construct
GSGQNRQRLKGLET

SEQ ID NO: 927 - protein, 14 aa, synthetic construct
GSGSPHKLGQNQQT

SEQ ID NO: 928 - protein, 14 aa, synthetic construct
GSGSPHKTSKNQQT

SEQ ID NO: 929 - protein, 14 aa, synthetic construct
GSGSPHKIGQNQQT

SEQ ID NO: 930 - protein, 14 aa, synthetic construct
GSGQDSPHVRNQQT

SEQ ID NO: 931 - protein, 14 aa, synthetic construct
GSGSPHKTSQNQQT

SEQ ID NO: 932 - protein, 14 aa, synthetic construct
GSGSPHASRKNQQT

SEQ ID NO: 933 - protein, 14 aa, synthetic construct
GSHSPHKSGQKQQT

SEQ ID NO: 934 - protein, 14 aa, synthetic construct
GSGSPHKTSQKQQT

SEQ ID NO: 935 - protein, 14 aa, synthetic construct
GSGSPHVRGQNKQT

SEQ ID NO: 936 - protein, 14 aa, synthetic construct
GSGSPHKTTQNQQT

SEQ ID NO: 937 - protein, 14 aa, synthetic construct
GSGPVRALRQNQQT

SEQ ID NO: 938 - protein, 14 aa, synthetic construct
GSGSPHVRGQKQQT

SEQ ID NO: 939 - protein, 14 aa, synthetic construct
CSGSPHKTSQNQQT

SEQ ID NO: 940 - protein, 14 aa, synthetic construct
CSHSPHKSGQNQQT

SEQ ID NO: 941 - protein, 6 aa, synthetic construct
SPHSKA

SEQ ID NO: 942 - DNA, 18 bp, synthetic construct
  source 1..18: mol_type = other DNA
agcccacacagcaaagca

SEQ ID NO: 943 - protein, 8 aa, synthetic construct
HDSPHKSG

SEQ ID NO: 944 - DNA, 24 bp, synthetic construct
  source 1..24: mol_type = other DNA
cacgacagcccacacaaaagcgga

SEQ ID NO: 945 - protein, 6 aa, synthetic construct
SPHSKA

SEQ ID NO: 946 - protein, 6 aa, synthetic construct
SPHKSG

SEQ ID NO: 947 - protein, 6 aa, synthetic construct
SPHARM

SEQ ID NO: 948 - protein, 6 aa, synthetic construct
SPHVKS

SEQ ID NO: 949 - protein, 6 aa, synthetic construct
SPHASR

SEQ ID NO: 950 - protein, 6 aa, synthetic construct
SPHVKI

SEQ ID NO: 951 - protein, 6 aa, synthetic construct
SPHKSR

SEQ ID NO: 952 - protein, 6 aa, synthetic construct
SPHSLR

SEQ ID NO: 953 - protein, 6 aa, synthetic construct
SPHSKW

SEQ ID NO: 954 - protein, 6 aa, synthetic construct
SPHKKN

SEQ ID NO: 955 - protein, 6 aa, synthetic construct
SPHVRM

SEQ ID NO: 956 - protein, 6 aa, synthetic construct
SPHRKA

SEQ ID NO: 957 - protein, 6 aa, synthetic construct
SPHKFG

SEQ ID NO: 958 - protein, 6 aa, synthetic construct
SPHKIG

SEQ ID NO: 959 - protein, 6 aa, synthetic construct
SPHKLG

SEQ ID NO: 960 - protein, 6 aa, synthetic construct
SPHSKL

SEQ ID NO: 961 - protein, 6 aa, synthetic construct
SPHSRG

SEQ ID NO: 962 - protein, 6 aa, synthetic construct
SPHSKS

SEQ ID NO: 963 - protein, 6 aa, synthetic construct
SPHKTS

SEQ ID NO: 964 - protein, 6 aa, synthetic construct
SPHKTT

SEQ ID NO: 965 - protein, 6 aa, synthetic construct
SPHKTY

SEQ ID NO: 966 - protein, 6 aa, synthetic construct
SPHKYG

SEQ ID NO: 967 - protein, 6 aa, synthetic construct
SPHSKD

SEQ ID NO: 968 - protein, 6 aa, synthetic construct
SPHSKP

SEQ ID NO: 969 - protein, 6 aa, synthetic construct
SPHSRA

SEQ ID NO: 970 - protein, 6 aa, synthetic construct
SPHSSR

SEQ ID NO: 971 - protein, 6 aa, synthetic construct
SPHWKA

SEQ ID NO: 972 - protein, 6 aa, synthetic construct
SPHTRG

SEQ ID NO: 973 - protein, 6 aa, synthetic construct
SPHVRG

SEQ ID NO: 974 - protein, 6 aa, synthetic construct
SPHKRG

SEQ ID NO: 975 - protein, 6 aa, synthetic construct
SPHGAR

SEQ ID NO: 976 - protein, 6 aa, synthetic construct
SPHRSG

SEQ ID NO: 977 - protein, 6 aa, synthetic construct
SPHKSA

SEQ ID NO: 978 - protein, 6 aa, synthetic construct
SPHSKR

SEQ ID NO: 979 - protein, 6 aa, synthetic construct
SPHFLR

SEQ ID NO: 980 - protein, 6 aa, synthetic construct
SPHVRR

SEQ ID NO: 981 - protein, 742 aa, synthetic construct
MAADGYLPDWLEDNLSEGIREWWALKPGAPQPKANQQHQDNARGLVLPGYKYLGPGNGLDKGEPVNAADAAALEHDKAYDQQLKAGDNPYLKYNHADAEFQERLKEDTSFGGNLGRAVFQAKKRLLEPLGLVEEAAKTAPGKKRPVEQSPQEPDSSAGIGKSGAQPAKKRLNFGQTGDTESVPDPQPIGEPPAAPSGVGSLTMASGGGAPVADNNEGADGVGSSSGNWHCDSQWLGDRVITTSTRTWALPTYNNHLYKQISNSTSGGSSNDNAYFGYSTPWGYFDFNRFHCHFSPRDWQRLINNNWGFRPKRLNFKLFNIQVKEVTDNNGVKTIANNLTSTVQVFTDSDYQLPYVLGSAHEGCLPPFPADVFMIPQYGYLTLNDGSQAVGRSSFYCLEYFPSQMLRTGNNFQFSYEFENVPFHSSYAHSQSLDRLMNPLIDQYLYYLSKTINGSGSPHSKAQNQQTLKFSVAGPSNMAVQGRNYIPGPSYRQQRVSTTVTQNNNSEFAWPGASSWALNGRNSLMNPGPAMASHKEGEDRFFPLSGSLIFGKQGTGRDNVDADKVMITNEEEIKTTNPVATESYGQVATNHQSAQAQAQTGWVQNQGILPGMVWQDRDVYLQGPIWAKIPHTDGNFHPSPLMGGFGMKHPPPQILIKNTPVPADPPTAFNKDKLNSFITQYSTGQVSVEIEWELQKENSKRWNPEIQYTSNYYKSNNVEFAVNTEGVYSEPRPIGTRYLTRNL

SEQ ID NO: 982 - protein, 742 aa, synthetic construct
MAADGYLPDWLEDNLSEGIREWWALKPGAPQPKANQQHQDNARGLVLPGYKYLGPGNGLDKGEPVNAADAAALEHDKAYDQQLKAGDNPYLKYNHADAEFQERLKEDTSFGGNLGRAVFQAKKRLLEPLGLVEEAAKTAPGKKRPVEQSPQEPDSSAGIGKSGAQPAKKRLNFGQTGDTESVPDPQPIGEPPAAPSGVGSLTMASGGGAPVADNNEGADGVGSSSGNWHCDSQWLGDRVITTSTRTWALPTYNNHLYKQISNSTSGGSSNDNAYFGYSTPWGYFDFNRFHCHFSPRDWQRLINNNWGFRPKRLNFKLFNIQVKEVTDNNGVKTIANNLTSTVQVFTDSDYQLPYVLGSAHEGCLPPFPADVFMIPQYGYLTLNDGSQAVGRSSFYCLEYFPSQMLRTGNNFQFSYEFENVPFHSSYAHSQSLDRLMNPLIDQYLYYLSKTINGHDSPHKSGQNQQTLKFSVAGPSNMAVQGRNYIPGPSYRQQRVSTTVTQNNNSEFAWPGASSWALNGRNSLMNPGPAMASHKEGEDRFFPLSGSLIFGKQGTGRDNVDADKVMITNEEEIKTTNPVATESYGQVATNHQSAQAQAQTGWVQNQGILPGMVWQDRDVYLQGPIWAKIPHTDGNFHPSPLMGGFGMKHPPPQILIKNTPVPADPPTAFNKDKLNSFITQYSTGQVSVEIEWELQKENSKRWNPEIQYTSNYYKSNNVEFAVNTEGVYSEPRPIGTRYLTRNL

SEQ ID NO: 983 - DNA, 2229 bp, synthetic construct
  source 1..2229: mol_type = other DNA
atggctgccgatggttatcttccagattggctcgaggacaaccttagtgaaggaattcgcgagtggtgggctttgaaacctggagcccctcaacccaaggcaaatcaacaacatcaagacaacgctcgaggtcttgtgcttccgggttacaaataccttggacccggcaacggactcgacaagggggagccggtcaacgcagcagacgcggcggccctcgagcacgacaaggcctacgaccagcagctcaaggccggagacaacccgtacctcaagtacaaccacgccgacgccgagttccaggagcggctcaaagaagatacgtcttttgggggcaacctcgggcgagcagtcttccaggccaaaaagaggcttcttgaacctcttggtctggttgaggaagcggctaagacggctcctggaaagaagaggcctgtagagcagtctcctcaggaaccggactcctccgcgggtattggcaaatcgggtgcacagcccgctaaaaagagactcaatttcggtcagactggcgacacagagtcagtcccagaccctcaaccaatcggagaacctcccgcagccccctcaggtgtgggatctcttacaatggcttcaggtggtggcgcaccagtggcagacaataacgaaggtgccgatggagtgggtagttcctcgggaaattggcattgcgattcccaatggctgggggacagagtcatcaccaccagcacccgaacctgggccctgcccacctacaacaatcacctctacaagcaaatctccaacagcacatctggaggatcttcaaatgacaacgcctacttcggctacagcaccccctgggggtattttgacttcaacagattccactgccacttctcaccacgtgactggcagcgactcatcaacaacaactggggattccggcctaagcgactcaacttcaagctcttcaacattcaggtcaaagaggttacggacaacaatggagtcaagaccatcgccaataaccttaccagcacggtccaggtcttcacggactcagactatcagctcccgtacgtgctcgggtcggctcacgagggctgcctcccgccgttcccagcggacgttttcatgattcctcagtacgggtatctgacgcttaatgatggaagccaggccgtgggtcgttcgtccttttactgcctggaatatttcccgtcgcaaatgctaagaacgggtaacaacttccagttcagctacgagtttgagaacgtacctttccatagcagctacgctcacagccaaagcctggaccgactaatgaatccactcatcgaccaatacttgtattacttgagtaaaacaattaacggaagcggaagcccacacagcaaagcacaaaaccaacagaccttgaagttttcggtagctggtcctagcaacatggctgtccagggaagaaactacatacctggacccagctaccgacaacaacgtgtctcaaccactgtgactcaaaacaacaacagcgaatttgcttggcctggagcttcttcttgggctctcaatggacgtaatagcttgatgaatcctggacctgctatggccagccacaaagaaggagaggaccgtttctttcctttgtctggatctttaatttttggcaaacaaggaactggaagagacaacgtggatgcggacaaagtcatgataaccaacgaagaagaaattaaaactactaacccggtagcaacggagtcctatggacaagtggccacaaaccaccagagtgcccaagcacaggcgcagaccggctgggttcaaaaccaaggaatacttccgggtatggtttggcaggacagagatgtgtacctgcaaggacccatttgggccaaaattcctcacacggacggcaactttcacccttctccgctgatgggagggtttggaatgaagcacccgcctcctcagatcctcatcaaaaacacacctgtacctgcggatcctccaacggccttcaacaaggacaagctgaactctttcatcacccagtattctactggccaagtcagcgtggagatcgagtgggagctgcagaaggaaaacagcaagcgctggaacccggagatccagtacacttccaactattacaagtctaataatgttgaatttgctgttaatactgaaggtgtatatagtgaaccccgccccattggcacgcggtatttaacgaggaacttataa

SEQ ID NO: 984 - DNA, 2229 bp, synthetic construct
  source 1..2229: mol_type = other DNA
atggctgccgatggttatcttccagattggctcgaggacaaccttagtgaaggaattcgcgagtggtgggctttgaaacctggagcccctcaacccaaggcaaatcaacaacatcaagacaacgctcgaggtcttgtgcttccgggttacaaataccttggacccggcaacggactcgacaagggggagccggtcaacgcagcagacgcggcggccctcgagcacgacaaggcctacgaccagcagctcaaggccggagacaacccgtacctcaagtacaaccacgccgacgccgagttccaggagcggctcaaagaagatacgtcttttgggggcaacctcgggcgagcagtcttccaggccaaaaagaggcttcttgaacctcttggtctggttgaggaagcggctaagacggctcctggaaagaagaggcctgtagagcagtctcctcaggaaccggactcctccgcgggtattggcaaatcgggtgcacagcccgctaaaaagagactcaatttcggtcagactggcgacacagagtcagtcccagaccctcaaccaatcggagaacctcccgcagccccctcaggtgtgggatctcttacaatggcttcaggtggtggcgcaccagtggcagacaataacgaaggtgccgatggagtgggtagttcctcgggaaattggcattgcgattcccaatggctgggggacagagtcatcaccaccagcacccgaacctgggccctgcccacctacaacaatcacctctacaagcaaatctccaacagcacatctggaggatcttcaaatgacaacgcctacttcggctacagcaccccctgggggtattttgacttcaacagattccactgccacttctcaccacgtgactggcagcgactcatcaacaacaactggggattccggcctaagcgactcaacttcaagctcttcaacattcaggtcaaagaggttacggacaacaatggagtcaagaccatcgccaataaccttaccagcacggtccaggtcttcacggactcagactatcagctcccgtacgtgctcgggtcggctcacgagggctgcctcccgccgttcccagcggacgttttcatgattcctcagtacgggtatctgacgcttaatgatggaagccaggccgtgggtcgttcgtccttttactgcctggaatatttcccgtcgcaaatgctaagaacgggtaacaacttccagttcagctacgagtttgagaacgtacctttccatagcagctacgctcacagccaaagcctggaccgactaatgaatccactcatcgaccaatacttgtattacttgagtaaaacaattaacggacacgacagcccacacaaaagcggacaaaaccaacagaccttgaagttttcggtagctggtcctagcaacatggctgtccagggaagaaactacatacctggacccagctaccgacaacaacgtgtctcaaccactgtgactcaaaacaacaacagcgaatttgcttggcctggagcttcttcttgggctctcaatggacgtaatagcttgatgaatcctggacctgctatggccagccacaaagaaggagaggaccgtttctttcctttgtctggatctttaatttttggcaaacaaggaactggaagagacaacgtggatgcggacaaagtcatgataaccaacgaagaagaaattaaaactactaacccggtagcaacggagtcctatggacaagtggccacaaaccaccagagtgcccaagcacaggcgcagaccggctgggttcaaaaccaaggaatacttccgggtatggtttggcaggacagagatgtgtacctgcaaggacccatttgggccaaaattcctcacacggacggcaactttcacccttctccgctgatgggagggtttggaatgaagcacccgcctcctcagatcctcatcaaaaacacacctgtacctgcggatcctccaacggccttcaacaaggacaagctgaactctttcatcacccagtattctactggccaagtcagcgtggagatcgagtgggagctgcagaaggaaaacagcaagcgctggaacccggagatccagtacacttccaactattacaagtctaataatgttgaatttgctgttaatactgaaggtgtatatagtgaaccccgccccattggcacgcggtatttaacgaggaacttataa

SEQ ID NO: 985 - protein, 6 aa, synthetic construct
STHASR

SEQ ID NO: 986 - protein, 6 aa, synthetic construct
SQHKSG

SEQ ID NO: 987 - DNA, 1184 bp, synthetic construct
  source 1..1184: mol_type = other DNA
cgtgaggctccggtgcccgtcagtgggcagagcgcacatcgcccacagtccccgagaagttggggggaggggtcggcaattgaaccggtgcctagagaaggtggcgcggggtaaactgggaaagtgatgtcgtgtactggctccgcctttttcccgagggtgggggagaaccgtatataagtgcagtagtcgccgtgaacgttctttttcgcaacgggtttgccgccagaacacaggtaagtgccgtgtgtggttcccgcgggcctggcctctttacgggttatggcccttgcgtgccttgaattacttccacctggctgcagtacgtgattcttgatcccgagcttcgggttggaagtgggtgggagagttcgaggccttgcgcttaaggagccccttcgcctcgtgcttgagttgaggcctggcctgggcgctggggccgccgcgtgcgaatctggtggcaccttcgcgcctgtctcgctgctttcgataagtctctagccatttaaaatttttgatgacctgctgcgacgctttttttctggcaagatagtcttgtaaatgcgggccaagatctgcacactggtatttcggtttttggggccgcgggcggcgacggggcccgtgcgtcccagcgcacatgttcggcgaggcggggcctgcgagcgcggccaccgagaatcggacgggggtagtctcaagctggccggcctgctctggtgcctggcctcgcgccgccgtgtatcgccccgccctgggcggcaaggctggcccggtcggcaccagttgcgtgagcggaaagatggccgcttcccggccctgctgcagggagctcaaaatggaggacgcggcgctcgggagagcgggcgggtgagtcacccacacaaaggaaaagggcctttccgtcctcagccgtcgcttcatgtgactccacggagtaccgggcgccgtccaggcacctcgattagttctcgagcttttggagtacgtcgtctttaggttggggggaggggttttatgcgatggagtttccccacactgagtgggtggagactgaagttaggccagcttggcacttgatgtaattctccttggaatttgccctttttgagtttggatcttggttcattctcaagcctcagacagtggttcaaagtttttttcttccatttcaggtgtcgtga

SEQ ID NO: 988 - DNA, 227 bp, synthetic construct
  source 1..227: mol_type = other DNA
gcccgtcagtgggcagagcgcacatcgcccacagtccccgagaagttggggggaggggtcggcaattgaaccggtgcctagagaaggtggcgcggggtaaactgggaaagtgatgtcgtgtactggctccgcctttttcccgagggtgggggagaaccgtatataagtgcagtagtcgccgtgaacgttctttttcgcaacgggtttgccgccagaacacgcgtaag

SEQ ID NO: 989 - skipped

SEQ ID NO: 990 - DNA, 16 bp, synthetic construct
  source 1..16: mol_type = other DNA
ggtggagaagagcatg

SEQ ID NO: 991 - DNA, 27 bp, synthetic construct
  source 1..27: mol_type = other DNA
gtcatcactgaggtggagaagagcatg

SEQ ID NO: 992-994 - skipped (3 entries)

SEQ ID NO: 995 - DNA, 222 bp, synthetic construct
  source 1..222: mol_type = other DNA
gcccgtcagtgggcagagcgcacatcgcccacagtccccgagaagttggggggaggggtcggcaattgaaccggtgcctagagaaggtggcgcggggtaaactgggaaagtgatgtcgtgtactggctccgcctttttcccgagggtgggggagaaccgtatataagtgcagtagtcgccgtgaacgttctttttcgcaacgggtttgccgccagaacacag

SEQ ID NO: 996 - DNA, 222 bp, synthetic construct
  source 1..222: mol_type = other DNA
gcccgtcagtgggcagagcgcacatcgcccacagtccccgagaagttggggggaggggtcggcaattgaaccggtgcctagagaaggtggcgcggggtaaactgggaaagtgatgtcgtgtactggctccgcctttttcccgagggtgggggagaaccgtatataagtgcagtagtcgccgtgaacgttctttttcgcaacgggtttgccgccagaacacgc

SEQ ID NO: 997 - skipped

SEQ ID NO: 998 - DNA, 229 bp, synthetic construct
  source 1..229: mol_type = other DNA
gtgcccgtcagtgggcagagcgcacatcgcccacagtccccgagaagttggggggaggggtcggcaattgaaccggtgcctagagaaggtggcgcggggtaaactgggaaagtgatgtcgtgtactggctccgcctttttcccgagggtgggggagaaccgtatataagtgcagtagtcgccgtgaacgttctttttcgcaacgggtttgccgccagaacacgcgtaag

SEQ ID NO: 999 - DNA, 235 bp, synthetic construct
  source 1..235: mol_type = other DNA
gctccggtgcccgtcagtgggcagagcgcacatcgcccacagtccccgagaagttggggggaggggtcggcaattgaaccggtgcctagagaaggtggcgcggggtaaactgggaaagtgatgtcgtgtactggctccgcctttttcccgagggtgggggagaaccgtatataagtgcagtagtcgccgtgaacgttctttttcgcaacgggtttgccgccagaacacgcgtaag

SEQ ID NO: 1000 - DNA, 241 bp, synthetic construct
  source 1..241: mol_type = other DNA
cgtgaggctccggtgcccgtcagtgggcagagcgcacatcgcccacagtccccgagaagttggggggaggggtcggcaattgaaccggtgcctagagaaggtggcgcggggtaaactgggaaagtgatgtcgtgtactggctccgcctttttcccgagggtgggggagaaccgtatataagtgcagtagtcgccgtgaacgttctttttcgcaacgggtttgccgccagaacacgcgtaag

SEQ ID NO: 1001 - DNA, 236 bp, synthetic construct
  source 1..236: mol_type = other DNA
cgtgaggctccggtgcccgtcagtgggcagagcgcacatcgcccacagtccccgagaagttggggggaggggtcggcaattgaaccggtgcctagagaaggtggcgcggggtaaactgggaaagtgatgtcgtgtactggctccgcctttttcccgagggtgggggagaaccgtatataagtgcagtagtcgccgtgaacgttctttttcgcaacgggtttgccgccagaacacag

SEQ ID NO: 1002 - DNA, 246 bp, synthetic construct
  source 1..246: mol_type = other DNA
gcatgcgtgaggctccggtgcccgtcagtgggcagagcgcacatcgcccacagtccccgagaagttggggggaggggtcggcaattgaaccggtgcctagagaaggtggcgcggggtaaactgggaaagtgatgtcgtgtactggctccgcctttttcccgagggtgggggagaaccgtatataagtgcagtagtcgccgtgaacgttctttttcgcaacgggtttgccgccagaacacgcgtaag

SEQ ID NO: 1003 - DNA, 241 bp, synthetic construct
  source 1..241: mol_type = other DNA
gcatgcgtgaggctccggtgcccgtcagtgggcagagcgcacatcgcccacagtccccgagaagttggggggaggggtcggcaattgaaccggtgcctagagaaggtggcgcggggtaaactgggaaagtgatgtcgtgtactggctccgcctttttcccgagggtgggggagaaccgtatataagtgcagtagtcgccgtgaacgttctttttcgcaacgggtttgccgccagaacacag

SEQ ID NO: 1004 - DNA, 257 bp, synthetic construct
  source 1..257: mol_type = other DNA
ggtggagaagagcatgcgtgaggctccggtgcccgtcagtgggcagagcgcacatcgcccacagtccccgagaagttggggggaggggtcggcaattgaaccggtgcctagagaaggtggcgcggggtaaactgggaaagtgatgtcgtgtactggctccgcctttttcccgagggtgggggagaaccgtatataagtgcagtagtcgccgtgaacgttctttttcgcaacgggtttgccgccagaacacgcgtaag

SEQ ID NO: 1005 - DNA, 252 bp, synthetic construct
  source 1..252: mol_type = other DNA
ggtggagaagagcatgcgtgaggctccggtgcccgtcagtgggcagagcgcacatcgcccacagtccccgagaagttggggggaggggtcggcaattgaaccggtgcctagagaaggtggcgcggggtaaactgggaaagtgatgtcgtgtactggctccgcctttttcccgagggtgggggagaaccgtatataagtgcagtagtcgccgtgaacgttctttttcgcaacgggtttgccgccagaacacag

SEQ ID NO: 1006 - DNA, 268 bp, synthetic construct
  source 1..268: mol_type = other DNA
gtcatcactgaggtggagaagagcatgcgtgaggctccggtgcccgtcagtgggcagagcgcacatcgcccacagtccccgagaagttggggggaggggtcggcaattgaaccggtgcctagagaaggtggcgcggggtaaactgggaaagtgatgtcgtgtactggctccgcctttttcccgagggtgggggagaaccgtatataagtgcagtagtcgccgtgaacgttctttttcgcaacgggtttgccgccagaacacgcgtaag

SEQ ID NO: 1007 - DNA, 263 bp, synthetic construct
  source 1..263: mol_type = other DNA
gtcatcactgaggtggagaagagcatgcgtgaggctccggtgcccgtcagtgggcagagcgcacatcgcccacagtccccgagaagttggggggaggggtcggcaattgaaccggtgcctagagaaggtggcgcggggtaaactgggaaagtgatgtcgtgtactggctccgcctttttcccgagggtgggggagaaccgtatataagtgcagtagtcgccgtgaacgttctttttcgcaacgggtttgccgccagaacacag

SEQ ID NO: 1008 - protein, 18 aa, synthetic construct
KTINGSGSPHSLLWNQQT

SEQ ID NO: 1009 - protein, 18 aa, synthetic construct
KTINGSGSPHSKAQYYVT

SEQ ID NO: 1010 - protein, 18 aa, synthetic construct
KTINGSGSPHSKLRRQQT

SEQ ID NO: 1011 - protein, 18 aa, synthetic construct
KTINGSGSPHSIWQNQQT

SEQ ID NO: 1012 - protein, 18 aa, synthetic construct
KTINGSSSPHCTAQNQQT

SEQ ID NO: 1013 - protein, 18 aa, synthetic construct
KTINGSGSPHSKAGCGQT

SEQ ID NO: 1014 - protein, 18 aa, synthetic construct
KSMNGSGSPHSRAQNQQT

SEQ ID NO: 1015 - protein, 18 aa, synthetic construct
KTINGSGSPHSKRLRQQT

SEQ ID NO: 1016 - protein, 18 aa, synthetic construct
KTINGSGSPHSLRRNQQT

SEQ ID NO: 1017 - protein, 18 aa, synthetic construct
KTINGSGSPHSRGRNQQT

SEQ ID NO: 1018 - protein, 18 aa, synthetic construct
KTINGSGSPHSEIVNQQT

SEQ ID NO: 1019 - protein, 18 aa, synthetic construct
KTINGSGSPHSSRRNQQT

SEQ ID NO: 1020 - protein, 18 aa, synthetic construct
KTINGSGSPHCLLQNQQT

SEQ ID NO: 1021 - protein, 18 aa, synthetic construct
KTIMRVGSPHSKAQNQQT

SEQ ID NO: 1022 - protein, 18 aa, synthetic construct
KTINGSGSPHSKAFRLQT

SEQ ID NO: 1023 - protein, 18 aa, synthetic construct
KTINGSGSPHCLAQNQQT

SEQ ID NO: 1024 - protein, 18 aa, synthetic construct
KTINGSCSPHRKAQNQQT

SEQ ID NO: 1025 - protein, 18 aa, synthetic construct
KTINGSGSPHFLRQNQQT

SEQ ID NO: 1026 - protein, 18 aa, synthetic construct
KTINGSGSPHSLRFNQQT

SEQ ID NO: 1027 - protein, 18 aa, synthetic construct
KTINGSGSPHSYLRNQQT

SEQ ID NO: 1028 - protein, 18 aa, synthetic construct
KTINGSGSPHCSLQNQQT

SEQ ID NO: 1029 - protein, 18 aa, synthetic construct
KTINGSGSPHVLWQNQQT

SEQ ID NO: 1030 - protein, 18 aa, synthetic construct
KTINGSGSPHSKWLLQQT

SEQ ID NO: 1031 - protein, 18 aa, synthetic construct
KTINGSGSPHSLWSNQQT

SEQ ID NO: 1032 - protein, 18 aa, synthetic construct
KTINGSGSPHSKRRLQQT

SEQ ID NO: 1033 - protein, 18 aa, synthetic construct
KTINGSGSPHSVYLNQQT

SEQ ID NO: 1034 - protein, 18 aa, synthetic construct
KTINGSGSPHSLWLNQQT

SEQ ID NO: 1035 - protein, 18 aa, synthetic construct
KTINGSGSPHSKAQRKLT

SEQ ID NO: 1036 - protein, 18 aa, synthetic construct
KTINGSGSPHSKALRRQT

SEQ ID NO: 1037 - protein, 18 aa, synthetic construct
KTINGSGSPHSKAQRLRT

SEQ ID NO: 1038 - protein, 18 aa, synthetic construct
KYLSGSGSPHSKAQNQQT

SEQ ID NO: 1039 - protein, 18 aa, synthetic construct
KTINGSGSPHSKAQRRLT

SEQ ID NO: 1040 - protein, 18 aa, synthetic construct
KTINGSGSPHSKARRQQT

SEQ ID NO: 1041 - protein, 18 aa, synthetic construct
KTINGSGSPHSKARRLQT

SEQ ID NO: 1042 - protein, 18 aa, synthetic construct
KTINGSGSPHSKSRRQQT

SEQ ID NO: 1043 - protein, 18 aa, synthetic construct
KTINGLLSPHWKAQNQQT

SEQ ID NO: 1044 - protein, 18 aa, synthetic construct
KTINGSGSPHSKARLRQT

SEQ ID NO: 1045 - protein, 18 aa, synthetic construct
KTINGSGSPHSKASKRQT

SEQ ID NO: 1046 - protein, 18 aa, synthetic construct
KTINGSGSPHVRRQNQQT

SEQ ID NO: 1047 - protein, 18 aa, synthetic construct
KTINGSGSPHSKAQLYRT

SEQ ID NO: 1048 - protein, 18 aa, synthetic construct
KGLSGSGSPHSKAQNQQT

SEQ ID NO: 1049 - protein, 18 aa, synthetic construct
KTINGSGSPHSLFRNQQT

SEQ ID NO: 1050 - protein, 18 aa, synthetic construct
KTINGSGSPHSKAQLTVT

SEQ ID NO: 1051 - protein, 18 aa, synthetic construct
KTINGSRSPHTRAQNQQT

SEQ ID NO: 1052 - protein, 18 aa, synthetic construct
KTINGSGSPHSKAKLRQT

SEQ ID NO: 1053 - protein, 18 aa, synthetic construct
KTINGSGSPHSKLIRQQT

SEQ ID NO: 1054 - protein, 18 aa, synthetic construct
KTINGSGSPHSKALRFQT

SEQ ID NO: 1055 - protein, 18 aa, synthetic construct
KTINGSGSPHSKRTFQQT

SEQ ID NO: 1056 - protein, 18 aa, synthetic construct
KTINGSGSPHSKAQKRLT

SEQ ID NO: 1057 - protein, 18 aa, synthetic construct
KTINGSGSPHLWSQNQQT

SEQ ID NO: 1058 - protein, 18 aa, synthetic construct
KTINGSGSPHLLWQNQQT

SEQ ID NO: 1059 - protein, 18 aa, synthetic construct
KTINGSGSPHSRLRNQQT

SEQ ID NO: 1060 - protein, 18 aa, synthetic construct
KTINGSGSPHSKRAAQQT

SEQ ID NO: 1061 - protein, 18 aa, synthetic construct
KTINGSGSPHSKRSWQQT

SEQ ID NO: 1062 - protein, 18 aa, synthetic construct
KTINGSGSPHSKAQLRRT

SEQ ID NO: 1063 - protein, 18 aa, synthetic construct
KTINGSGSPHYLVQNQQT

SEQ ID NO: 1064 - protein, 18 aa, synthetic construct
KTINGSGSPHSKLFRQQT

SEQ ID NO: 1065 - protein, 18 aa, synthetic construct
KTINGSGSPHSKRAMQQT

SEQ ID NO: 1066 - protein, 18 aa, synthetic construct
KTINGSGSPHSKTLRQQT

SEQ ID NO: 1067 - protein, 18 aa, synthetic construct
KTINGSGSPHSRSRNQQT

SEQ ID NO: 1068 - protein, 18 aa, synthetic construct
KTINGSGSPHRRRQNQQT

SEQ ID NO: 1069 - protein, 18 aa, synthetic construct
KTINGSGSPHSKTCLQQT

SEQ ID NO: 1070 - protein, 18 aa, synthetic construct
KTINGSGSPHSKSRWQQT

SEQ ID NO: 1071 - protein, 18 aa, synthetic construct
KTINGSGSPHRFRQNQQT

SEQ ID NO: 1072 - protein, 18 aa, synthetic construct
KTINGLRSPHRKAQNQQT

SEQ ID NO: 1073 - protein, 18 aa, synthetic construct
KTRSRSGSPHSKAQNQQT

SEQ ID NO: 1074 - protein, 18 aa, synthetic construct
KTINGSGSPHSKAQLVVT

SEQ ID NO: 1075 - protein, 18 aa, synthetic construct
KTINGSGSPHSRKLNQQT

SEQ ID NO: 1076 - protein, 18 aa, synthetic construct
KTINGSGSPHSLLCNQQT

SEQ ID NO: 1077 - protein, 18 aa, synthetic construct
KTINGKRSPHSKAQNQQT

SEQ ID NO: 1078 - protein, 18 aa, synthetic construct
KTINGSRSPHLFAQNQQT

SEQ ID NO: 1079 - protein, 18 aa, synthetic construct
KSINGSGSPHSKAHDQQT

SEQ ID NO: 1080 - protein, 18 aa, synthetic construct
KTINGSGSPHSKAQRSRT

SEQ ID NO: 1081 - protein, 18 aa, synthetic construct
KTINGSGSPHSTWLNQQT

SEQ ID NO: 1082 - protein, 18 aa, synthetic construct
KTINGSGSPHSKASRRQT

SEQ ID NO: 1083 - protein, 18 aa, synthetic construct
KTINGSGSPHSKRSMQQT

SEQ ID NO: 1084 - protein, 18 aa, synthetic construct
KTINGSGSPHSCLQNQQT

SEQ ID NO: 1085 - protein, 18 aa, synthetic construct
KTINGSGSPHSKRLWQQT

SEQ ID NO: 1086 - protein, 18 aa, synthetic construct
KTINGSGSPHSWLSNQQT

SEQ ID NO: 1087 - protein, 18 aa, synthetic construct
KTINGSGSPHLRRQNQQT

SEQ ID NO: 1088 - protein, 18 aa, synthetic construct
KTINGSGSPHSKARRSQT

SEQ ID NO: 1089 - protein, 18 aa, synthetic construct
KTINGSGSPHSKHLRQQT

SEQ ID NO: 1090 - protein, 18 aa, synthetic construct
KTINGSGSPHSCSQNQQT

SEQ ID NO: 1091 - protein, 18 aa, synthetic construct
KTINGSGSPHSKSFRQQT

SEQ ID NO: 1092 - protein, 18 aa, synthetic construct
KTINGSGSPHLCLQNQQT

SEQ ID NO: 1093 - protein, 18 aa, synthetic construct
KTINGSGSPHSKAQTSRT

SEQ ID NO: 1094 - protein, 18 aa, synthetic construct
KTINGSGSPHSLCSNQQT

SEQ ID NO: 1095 - protein, 18 aa, synthetic construct
KTINGSRSPHLRAQNQQT

SEQ ID NO: 1096 - protein, 18 aa, synthetic construct
KTINGSGSPHSKAQVSKT

SEQ ID NO: 1097 - protein, 18 aa, synthetic construct
KTINGSGSPHSKAQRHVT

SEQ ID NO: 1098 - protein, 18 aa, synthetic construct
KTINGSSSPHLCAQNQQT

SEQ ID NO: 1099 - protein, 18 aa, synthetic construct
KTINGSGSPHSFLRNQQT

SEQ ID NO: 1100 - protein, 18 aa, synthetic construct
KTINGSGSPHSFVLNQQT

SEQ ID NO: 1101 - protein, 18 aa, synthetic construct
KTINGSGSPHSKMRAQQT

SEQ ID NO: 1102 - protein, 18 aa, synthetic construct
KTINGSGSPHRPRQNQQT

SEQ ID NO: 1103 - protein, 18 aa, synthetic construct
KTINGSGSPHSKCLLQQT

SEQ ID NO: 1104 - protein, 18 aa, synthetic construct
KTINGSGSPHSKAQSRRT

SEQ ID NO: 1105 - protein, 18 aa, synthetic construct
KTINGSGSPHSRWQNQQT

SEQ ID NO: 1106 - protein, 18 aa, synthetic construct
KYSVGSGSPHSKAQNQQT

SEQ ID NO: 1107 - protein, 18 aa, synthetic construct
KTINGSGSPHSKRFLQQT

SEQ ID NO: 1108 - protein, 18 aa, synthetic construct
KTINGSGSPHSLFLNQQT

SEQ ID NO: 1109 - protein, 18 aa, synthetic construct
KTINGSGSPHSKAYLRQT

SEQ ID NO: 1110 - protein, 18 aa, synthetic construct
KTINGSGSPHSKRNGQQT

SEQ ID NO: 1111 - protein, 18 aa, synthetic construct
KTINGSGSPHTRRQNQQT

SEQ ID NO: 1112 - protein, 18 aa, synthetic construct
KTINGSGSPHSKPRLQQT

SEQ ID NO: 1113 - protein, 18 aa, synthetic construct
KTINFLRSPHSKAQNQQT

SEQ ID NO: 1114 - protein, 18 aa, synthetic construct
KTINGSGSPHLLCQNQQT

SEQ ID NO: 1115 - protein, 18 aa, synthetic construct
KTINGSGSPHSKARIVQT

SEQ ID NO: 1116 - protein, 18 aa, synthetic construct
KTINGSKSPHFKAQNQQT

SEQ ID NO: 1117 - protein, 18 aa, synthetic construct
KTINGSGSPHSKAQIRLT

SEQ ID NO: 1118 - protein, 18 aa, synthetic construct
KTINGSSSPHWVAQNQQT

SEQ ID NO: 1119 - protein, 18 aa, synthetic construct
KTINGSGSPHSKATRRQT

SEQ ID NO: 1120 - protein, 18 aa, synthetic construct
KTINGSLSPHSCAQNQQT

SEQ ID NO: 1121 - protein, 18 aa, synthetic construct
KTINGSGSPHSLYLNQQT

SEQ ID NO: 1122 - protein, 18 aa, synthetic construct
KTINGSGSPHSKVGRQQT

SEQ ID NO: 1123 - protein, 18 aa, synthetic construct
KTINGSGSPHSRRLNQQT

SEQ ID NO: 1124 - protein, 18 aa, synthetic construct
KTINGSGSPHSKAQHSRT

SEQ ID NO: 1125 - protein, 18 aa, synthetic construct
KTINGSGSPHSKAFPRQT

SEQ ID NO: 1126 - protein, 18 aa, synthetic construct
KTINGSPSPHRRAQNQQT

SEQ ID NO: 1127 - protein, 18 aa, synthetic construct
KTINGSGSPHSKRNLQQT

SEQ ID NO: 1128 - protein, 18 aa, synthetic construct
KTINGSGSPHSKPTRQQT

SEQ ID NO: 1129 - protein, 18 aa, synthetic construct
KTINGSGSPHSKLWLQQT

SEQ ID NO: 1130 - protein, 18 aa, synthetic construct
KTINGSGSPHWLAQNQQT

SEQ ID NO: 1131 - protein, 18 aa, synthetic construct
KTINGSGSPHRTRQNQQT

SEQ ID NO: 1132 - protein, 18 aa, synthetic construct
KTINGSGSPHSKLNKQQT

SEQ ID NO: 1133 - protein, 18 aa, synthetic construct
KTINGSGSPHSSLWNQQT

SEQ ID NO: 1134 - protein, 18 aa, synthetic construct
KTINGSGSPHSKAQITLT

SEQ ID NO: 1135 - protein, 18 aa, synthetic construct
KTINGSGSPHSKFLFQQT

SEQ ID NO: 1136 - protein, 18 aa, synthetic construct
KTINGSGSPHSKRTPQQT

SEQ ID NO: 1137 - protein, 18 aa, synthetic construct
KTINGSGSPHSKAQNSRR

SEQ ID NO: 1138 - protein, 18 aa, synthetic construct
KTINGSGSPHSRLKNQQT

SEQ ID NO: 1139 - protein, 18 aa, synthetic construct
KTINGSGSPHSCLLNQQT

SEQ ID NO: 1140 - protein, 18 aa, synthetic construct
KTINGSGSPHTLYQNQQT

SEQ ID NO: 1141 - protein, 18 aa, synthetic construct
KTINGSGSPHSKYPSQQT

SEQ ID NO: 1142 - protein, 18 aa, synthetic construct
KTINGSGSPHSKLRNQQT

SEQ ID NO: 1143 - protein, 18 aa, synthetic construct
KTINGSGSPHLNWQNQQT

SEQ ID NO: 1144 - protein, 18 aa, synthetic construct
KTINGVVSPHRKAQNQQT

SEQ ID NO: 1145 - protein, 18 aa, synthetic construct
KTINGSGSPHSYRPNQQT

SEQ ID NO: 1146 - protein, 18 aa, synthetic construct
KTINGSTSPHRRAQNQQT

SEQ ID NO: 1147 - protein, 18 aa, synthetic construct
KTINGSCSPHPLAQNQQT

SEQ ID NO: 1148 - protein, 18 aa, synthetic construct
KTINGSGSPHSKAFARQT

SEQ ID NO: 1149 - protein, 18 aa, synthetic construct
KTINGSGSPHSKALRYQT

SEQ ID NO: 1150 - protein, 18 aa, synthetic construct
KTINGSKSPHRLAQNQQT

SEQ ID NO: 1151 - protein, 18 aa, synthetic construct
KTINMRVSPHSKAQNQQT

SEQ ID NO: 1152 - protein, 18 aa, synthetic construct
KTINGSGSPHMYLQNQQT

SEQ ID NO: 1153 - protein, 18 aa, synthetic construct
KTINGSGSPHSKLARQQT

SEQ ID NO: 1154 - protein, 18 aa, synthetic construct
KTINGSGSPHSKARPYQT

SEQ ID NO: 1155 - protein, 18 aa, synthetic construct
KTINGSGSPHSKRVPQQT

SEQ ID NO: 1156 - protein, 18 aa, synthetic construct
KTINGSGSPHLSWQNQQT

SEQ ID NO: 1157 - protein, 18 aa, synthetic construct
KTINGRSSPHGKAQNQQT

SEQ ID NO: 1158 - protein, 18 aa, synthetic construct
KTINGSGSPHLWTQNQQT

SEQ ID NO: 1159 - protein, 18 aa, synthetic construct
KTINGLLSPHRKAQNQQT

SEQ ID NO: 1160 - protein, 18 aa, synthetic construct
KTINGSGSPHRLRQNQQT

SEQ ID NO: 1161 - protein, 18 aa, synthetic construct
KTINGSCSPHSGAQNQQT

SEQ ID NO: 1162 - protein, 18 aa, synthetic construct
KTINGSGSPHSKAQRRST

SEQ ID NO: 1163 - protein, 18 aa, synthetic construct
KTINGSGSPHSKLCSQQT

SEQ ID NO: 1164 - protein, 18 aa, synthetic construct
KTINGSGSPHSKAQLLKT

SEQ ID NO: 1165 - protein, 18 aa, synthetic construct
KTINGRKSPHSKAQNQQT

SEQ ID NO: 1166 - protein, 18 aa, synthetic construct
KTINGSGSPHLLYQNQQT

SEQ ID NO: 1167 - protein, 18 aa, synthetic construct
KTINGSGSPHSKLLRQQT

SEQ ID NO: 1168 - protein, 18 aa, synthetic construct
KTINGSGSPHSLRHNQQT

SEQ ID NO: 1169 - protein, 18 aa, synthetic construct
KTINGSGSPHSSKRNQQT

SEQ ID NO: 1170 - protein, 18 aa, synthetic construct
KTINGSGSPHSKARSRQT

SEQ ID NO: 1171 - protein, 18 aa, synthetic construct
KTINGRSSPHRKAQNQQT

SEQ ID NO: 1172 - protein, 18 aa, synthetic construct
KTINGSKSPHRTAQNQQT

SEQ ID NO: 1173 - protein, 18 aa, synthetic construct
KTINGMRSPHVKAQNQQT

SEQ ID NO: 1174 - protein, 18 aa, synthetic construct
KTINGSGSPHSKRMSQQT

SEQ ID NO: 1175 - protein, 18 aa, synthetic construct
KTINGSGSPHSKVPKQQT

SEQ ID NO: 1176 - protein, 18 aa, synthetic construct
KTINLIRSPHSKAQNQQT

SEQ ID NO: 1177 - protein, 18 aa, synthetic construct
KTINGSGSPHPFLQNQQT

SEQ ID NO: 1178 - protein, 18 aa, synthetic construct
KTINGSGSPHSKARLWQT

SEQ ID NO: 1179 - protein, 18 aa, synthetic construct
KTINGSGSPHSRTRNQQT

SEQ ID NO: 1180 - protein, 18 aa, synthetic construct
KTINGSGSPHSKRSNQQT

SEQ ID NO: 1181 - protein, 18 aa, synthetic construct
KTINGSLSPHSWAQNQQT

SEQ ID NO: 1182 - protein, 18 aa, synthetic construct
KTINGSRSPHYKAQNQQT

SEQ ID NO: 1183 - protein, 18 aa, synthetic construct
KTINRHSSPHSKAQNQQT

SEQ ID NO: 1184 - protein, 18 aa, synthetic construct
KTINGSGSPHSKRRNQQT

SEQ ID NO: 1185 - protein, 18 aa, synthetic construct
KTINGSGSPHSKAKHLQT

SEQ ID NO: 1186 - protein, 18 aa, synthetic construct
KTINGSGSPHSKRTYQQT

SEQ ID NO: 1187 - protein, 18 aa, synthetic construct
KTINGVLSPHRKAQNQQT

SEQ ID NO: 1188 - protein, 18 aa, synthetic construct
KTINGSGSPHSFITNQQT

SEQ ID NO: 1189 - protein, 18 aa, synthetic construct
KTINGSGSPHSTRLNQQT

SEQ ID NO: 1190 - protein, 18 aa, synthetic construct
KTINGSGSPHSKRTSQQT

SEQ ID NO: 1191 - protein, 18 aa, synthetic construct
KTINGSGSPHSRRSNQQT

SEQ ID NO: 1192 - protein, 18 aa, synthetic construct
KTINGHLSPHRKAQNQQT

SEQ ID NO: 1193 - protein, 18 aa, synthetic construct
KTINGSGSPHSKAQFSRT

SEQ ID NO: 1194 - protein, 18 aa, synthetic construct
KTINGSGSPHSKAQTFRT

SEQ ID NO: 1195 - protein, 18 aa, synthetic construct
KTINGSGSPHSKPLRQQT

SEQ ID NO: 1196 - protein, 18 aa, synthetic construct
KTINGSGSPHSKASCRQT

SEQ ID NO: 1197 - protein, 18 aa, synthetic construct
KTINGSGSPHSKILWQQT

SEQ ID NO: 1198 - protein, 18 aa, synthetic construct
KTINGSGSPHSKALKRQT

SEQ ID NO: 1199 - protein, 18 aa, synthetic construct
KTINGSGSPHSKAHRSQT

SEQ ID NO: 1200 - protein, 18 aa, synthetic construct
KTINGSGSPHSMLYNQQT

SEQ ID NO: 1201 - protein, 18 aa, synthetic construct
KTINGSGSPHSKCTLQQT

SEQ ID NO: 1202 - protein, 18 aa, synthetic construct
KTINGSGSPHSKAQNRMR

SEQ ID NO: 1203 - protein, 18 aa, synthetic construct
KTINGSGSPHSKLVRQQT

SEQ ID NO: 1204 - protein, 18 aa, synthetic construct
KTINGSGSPHSKRILQQT

SEQ ID NO: 1205 - protein, 18 aa, synthetic construct
KTINGSGSPHSKAQWLRT

SEQ ID NO: 1206 - protein, 18 aa, synthetic construct
KTINGSGSPHSLTCNQQT

SEQ ID NO: 1207 - protein, 18 aa, synthetic construct
KTINGIRSPHTKAQNQQT

SEQ ID NO: 1208 - protein, 18 aa, synthetic construct
KTINGSGSPHSKAQRWLT

SEQ ID NO: 1209 - protein, 18 aa, synthetic construct
KTINGSGSPHSKAQLSIT

SEQ ID NO: 1210 - protein, 18 aa, synthetic construct
KTINGSGSPHIYRQNQQT

SEQ ID NO: 1211 - protein, 18 aa, synthetic construct
KTINGSGSPHSLRSNQQT

SEQ ID NO: 1212 - protein, 18 aa, synthetic construct
KTINGSGSPHSKVKPQQT

SEQ ID NO: 1213 - protein, 18 aa, synthetic construct
KTINGSGSPHSKATRHQT

SEQ ID NO: 1214 - protein, 18 aa, synthetic construct
KTINGSLSPHLCAQNQQT

SEQ ID NO: 1215 - protein, 18 aa, synthetic construct
KTINGSGSPHSKACASQT

SEQ ID NO: 1216 - protein, 18 aa, synthetic construct
KWSPGSGSPHSKAQNQQT

SEQ ID NO: 1217 - protein, 18 aa, synthetic construct
KTINGYLSPHRKAQNQQT

SEQ ID NO: 1218 - protein, 18 aa, synthetic construct
KTINGSGSPHSKVIRQQT

SEQ ID NO: 1219 - protein, 18 aa, synthetic construct
KTINGSGSPHFLLQNQQT

SEQ ID NO: 1220 - protein, 18 aa, synthetic construct
KTINGSGSPHSKARSKQT

SEQ ID NO: 1221 - protein, 18 aa, synthetic construct
KTINGVPSPHWKAQNQQT

SEQ ID NO: 1222 - protein, 18 aa, synthetic construct
KTINGSGSPHSKATRNQT

SEQ ID NO: 1223 - protein, 18 aa, synthetic construct
KTINGSGSPHSKACSAQT

SEQ ID NO: 1224 - protein, 18 aa, synthetic construct
KTINGSGSPHSKARYVQT

SEQ ID NO: 1225 - protein, 18 aa, synthetic construct
KTINGSRSPHARAQNQQT

SEQ ID NO: 1226 - protein, 18 aa, synthetic construct
KTINGSGSPHSKAQHLRT

SEQ ID NO: 1227 - protein, 18 aa, synthetic construct
KTINGSGSPHSKAKSRQT

SEQ ID NO: 1228 - protein, 18 aa, synthetic construct
KTINGSGSPHSKIGRQQT

SEQ ID NO: 1229 - protein, 18 aa, synthetic construct
KTINGLASPHRKAQNQQT

SEQ ID NO: 1230 - protein, 18 aa, synthetic construct
KTINGSGSPHSKARTRQT

SEQ ID NO: 1231 - protein, 18 aa, synthetic construct
KTINGSGSPHSKSIRQQT

SEQ ID NO: 1232 - protein, 18 aa, synthetic construct
KTINGSGSPHSKRLYQQT

SEQ ID NO: 1233 - protein, 18 aa, synthetic construct
KTINGLPSPHRKAQNQQT

SEQ ID NO: 1234 - protein, 18 aa, synthetic construct
KTINGSLSPHRRAQNQQT

SEQ ID NO: 1235 - protein, 18 aa, synthetic construct
KTINGKTSPHGKAQNQQT

SEQ ID NO: 1236 - protein, 18 aa, synthetic construct
KTINGSRSPHRLAQNQQT

SEQ ID NO: 1237 - protein, 18 aa, synthetic construct
KTINGSGSPHSLTWNQQT

SEQ ID NO: 1238 - protein, 18 aa, synthetic construct
KTINGSKSPHRKAQNQQT

SEQ ID NO: 1239 - protein, 18 aa, synthetic construct
KTINGSGSPHSKAQLRKT

SEQ ID NO: 1240 - protein, 18 aa, synthetic construct
KTINGSGSPHSKSRHQQT

SEQ ID NO: 1241 - protein, 18 aa, synthetic construct
KTINRRLSPHSKAQNQQT

SEQ ID NO: 1242 - protein, 18 aa, synthetic construct
KTINGSGSPHSRRVNQQT

SEQ ID NO: 1243 - protein, 18 aa, synthetic construct
KTINGSGSPHSHWQNQQT

SEQ ID NO: 1244 - protein, 18 aa, synthetic construct
KTTHCSGSPHSKAQNQQT

SEQ ID NO: 1245 - protein, 18 aa, synthetic construct
KTINGSGSPHSWLQNQQT

SEQ ID NO: 1246 - protein, 18 aa, synthetic construct
KTINGSTSPHYLAQNQQT

SEQ ID NO: 1247 - protein, 18 aa, synthetic construct
KTINGLTSPHRKAQNQQT

SEQ ID NO: 1248 - protein, 18 aa, synthetic construct
KTINGSGSPHSKRLLQQT

SEQ ID NO: 1249 - protein, 18 aa, synthetic construct
KTINGSGSPHSKLCVQQT

SEQ ID NO: 1250 - protein, 18 aa, synthetic construct
KTINGFLSPHRKAQNQQT

SEQ ID NO: 1251 - protein, 18 aa, synthetic construct
KTINGSGSPHSKMRPQQT

SEQ ID NO: 1252 - protein, 18 aa, synthetic construct
KTINGSGSPHSKQTRQQT

SEQ ID NO: 1253 - protein, 18 aa, synthetic construct
KTINGSGSPHSYLINQQT

SEQ ID NO: 1254 - protein, 18 aa, synthetic construct
KTINGSGSPHSKALRSQT

SEQ ID NO: 1255 - protein, 18 aa, synthetic construct
KTINGMLSPHRKAQNQQT

SEQ ID NO: 1256 - protein, 18 aa, synthetic construct
KTINGSGSPHSKCLTQQT

SEQ ID NO: 1257 - protein, 18 aa, synthetic construct
KTINGSGSPHSKAQLTLT

SEQ ID NO: 1258 - protein, 18 aa, synthetic construct
KTINGHSSPHRKAQNQQT

SEQ ID NO: 1259 - protein, 18 aa, synthetic construct
KTINGSGSPHLTWQNQQT

SEQ ID NO: 1260 - protein, 18 aa, synthetic construct
KTINGSGSPHSKAQYCLT

SEQ ID NO: 1261 - protein, 18 aa, synthetic construct
KTINGSGSPHSFLVNQQT

SEQ ID NO: 1262 - protein, 18 aa, synthetic construct
KTINMSRSPHSKAQNQQT

SEQ ID NO: 1263 - protein, 18 aa, synthetic construct
KTINGSGSPHSKAQLHRT

SEQ ID NO: 1264 - protein, 18 aa, synthetic construct
KTINGSGSPHLYMQNQQT

SEQ ID NO: 1265 - protein, 18 aa, synthetic construct
KTINGSRSPHRRAQNQQT

SEQ ID NO: 1266 - protein, 18 aa, synthetic construct
KTINGSGSPHSKAQNRRS

SEQ ID NO: 1267 - protein, 18 aa, synthetic construct
KTINLRFSPHSKAQNQQT

SEQ ID NO: 1268 - protein, 18 aa, synthetic construct
KTINGSGSPHSKAQRLWT

SEQ ID NO: 1269 - protein, 18 aa, synthetic construct
KTINGSGSPHSKGRAQQT

SEQ ID NO: 1270 - protein, 18 aa, synthetic construct
KTINGSGSPHSLSCNQQT

SEQ ID NO: 1271 - protein, 18 aa, synthetic construct
KTINGLVSPHCKAQNQQT

SEQ ID NO: 1272 - protein, 18 aa, synthetic construct
KTINGSSSPHLWAQNQQT

SEQ ID NO: 1273 - protein, 18 aa, synthetic construct
KTINGSGSPHSKAHRLQT

SEQ ID NO: 1274 - protein, 18 aa, synthetic construct
KTINGSGSPHPYAQNQQT

SEQ ID NO: 1275 - protein, 18 aa, synthetic construct
KTINGSGSPHSTRPNQQT

SEQ ID NO: 1276 - protein, 18 aa, synthetic construct
KTINGRSSPHPKAQNQQT

SEQ ID NO: 1277 - protein, 18 aa, synthetic construct
KTINGSGSPHSKAQSWRT

SEQ ID NO: 1278 - protein, 18 aa, synthetic construct
KTINGQRSPHVKAQNQQT

SEQ ID NO: 1279 - protein, 18 aa, synthetic construct
KTINGSGSPHSKAQFVRT

SEQ ID NO: 1280 - protein, 18 aa, synthetic construct
KTINGSGSPHSKCLNQQT

SEQ ID NO: 1281 - protein, 18 aa, synthetic construct
KTINGSGSPHSSLCNQQT

SEQ ID NO: 1282 - protein, 18 aa, synthetic construct
KTINGQRSPHSKAQNQQT

SEQ ID NO: 1283 - protein, 18 aa, synthetic construct
KTINGSGSPHSLSWNQQT

SEQ ID NO: 1284 - protein, 18 aa, synthetic construct
KTINGSGSPHSSRKNQQT

SEQ ID NO: 1285 - protein, 18 aa, synthetic construct
KTINGSGSPHSKRTLQQT

SEQ ID NO: 1286 - protein, 18 aa, synthetic construct
KTINGSLSPHCLAQNQQT

SEQ ID NO: 1287 - protein, 18 aa, synthetic construct
KTINGSGSPHSKAQSSRT

SEQ ID NO: 1288 - protein, 18 aa, synthetic construct
KTINGSGSPHLKRQNQQT

SEQ ID NO: 1289 - protein, 18 aa, synthetic construct
KTINGSGSPHSKARMGQT

SEQ ID NO: 1290 - protein, 18 aa, synthetic construct
KTINGSGSPHSKAQVKLT

SEQ ID NO: 1291 - protein, 18 aa, synthetic construct
KTINGSGSPHSKLPRQQT

SEQ ID NO: 1292 - protein, 18 aa, synthetic construct
KTINGSGSPHSKLCLQQT

SEQ ID NO: 1293 - protein, 18 aa, synthetic construct
KTINGSGSPHSPLWNQQT

SEQ ID NO: 1294 - protein, 18 aa, synthetic construct
KTINGSVSPHSWAQNQQT

SEQ ID NO: 1295 - protein, 18 aa, synthetic construct
KTIRSKGSPHSKAQNQQT

SEQ ID NO: 1296 - protein, 18 aa, synthetic construct
KTINGSRSPHSWAQNQQT

SEQ ID NO: 1297 - protein, 18 aa, synthetic construct
KTINGSGSPHSKILRQQT

SEQ ID NO: 1298 - protein, 18 aa, synthetic construct
KTINGRQSPHVKAQNQQT

SEQ ID NO: 1299 - protein, 18 aa, synthetic construct
KTINGSGSPHSKAQSIKT

SEQ ID NO: 1300 - protein, 18 aa, synthetic construct
KTINGSGSPHSKAQASKT

SEQ ID NO: 1301 - protein, 18 aa, synthetic construct
KTINGSGSPHSRLFNQQT

SEQ ID NO: 1302 - protein, 18 aa, synthetic construct
KTINGSGSPHIYLQNQQT

SEQ ID NO: 1303 - protein, 18 aa, synthetic construct
KTINGSGSPHSRVRNQQT

SEQ ID NO: 1304 - protein, 18 aa, synthetic construct
KTINGSGSPHSKAVRAQT

SEQ ID NO: 1305 - protein, 18 aa, synthetic construct
KTINGSGSPHSKPARQQT

SEQ ID NO: 1306 - protein, 18 aa, synthetic construct
KTINGSGSPHSRYSNQQT

SEQ ID NO: 1307 - protein, 18 aa, synthetic construct
KTINGSRSPHRSAQNQQT

SEQ ID NO: 1308 - protein, 18 aa, synthetic construct
KTINGSLSPHIYAQNQQT

SEQ ID NO: 1309 - protein, 18 aa, synthetic construct
KTINGSGSPHSKPVRQQT

SEQ ID NO: 1310 - protein, 18 aa, synthetic construct
KTINGMRSPHGKAQNQQT

SEQ ID NO: 1311 - protein, 18 aa, synthetic construct
KTINGSGSPHSKARITQT

SEQ ID NO: 1312 - protein, 18 aa, synthetic construct
KTINGSGSPHSWSLNQQT

SEQ ID NO: 1313 - protein, 18 aa, synthetic construct
KTINTSRSPHSKAQNQQT

SEQ ID NO: 1314 - protein, 18 aa, synthetic construct
KTINGSGSPHSKAFTRQT

SEQ ID NO: 1315 - protein, 18 aa, synthetic construct
KTINGSGSPHSKAVRNQT

SEQ ID NO: 1316 - protein, 18 aa, synthetic construct
KTINGSGSPHSKAQTNRT

SEQ ID NO: 1317 - protein, 18 aa, synthetic construct
KTINGSGSPHSKANRMQT

SEQ ID NO: 1318 - protein, 18 aa, synthetic construct
KTINGSGSPHSKAQLVLT

SEQ ID NO: 1319 - protein, 18 aa, synthetic construct
KTINGSGSPHSKATRQQT

SEQ ID NO: 1320 - protein, 18 aa, synthetic construct
KTINGSGSPHSKARGTQT

SEQ ID NO: 1321 - protein, 18 aa, synthetic construct
KTINGSGSPHSKAQWSVT

SEQ ID NO: 1322 - protein, 18 aa, synthetic construct
KTINGSGSPHSKAWLIQT

SEQ ID NO: 1323 - protein, 18 aa, synthetic construct
KTINGSGSPHSKAFRPQT

SEQ ID NO: 1324 - protein, 18 aa, synthetic construct
KTINGSGSPHRRSQNQQT

SEQ ID NO: 1325 - protein, 18 aa, synthetic construct
KTINGSGSPHSKGIRQQT

SEQ ID NO: 1326 - protein, 18 aa, synthetic construct
KTINGSGSPHCTLQNQQT

SEQ ID NO: 1327 - protein, 18 aa, synthetic construct
KPLPGSGSPHSKAQNQQT

SEQ ID NO: 1328 - protein, 18 aa, synthetic construct
KTINGSGSPHLVCQNQQT

SEQ ID NO: 1329 - protein, 18 aa, synthetic construct
KTINGSGSPHSKARGYQT

SEQ ID NO: 1330 - protein, 18 aa, synthetic construct
KTINGRISPHGKAQNQQT

SEQ ID NO: 1331 - protein, 18 aa, synthetic construct
KTINGSSSPHWLAQNQQT

SEQ ID NO: 1332 - protein, 18 aa, synthetic construct
KTINGSGSPHSKARMAQT

SEQ ID NO: 1333 - protein, 18 aa, synthetic construct
KPLDGSGSPHSKAQNQQT

SEQ ID NO: 1334 - protein, 18 aa, synthetic construct
KPLRGSGSPHSKAQNQQT

SEQ ID NO: 1335 - protein, 18 aa, synthetic construct
KTINGSGSPHSKAQNAKL

SEQ ID NO: 1336 - protein, 18 aa, synthetic construct
KTINGSGSPHSKLSKQQT

SEQ ID NO: 1337 - protein, 18 aa, synthetic construct
KTINGSGSPHSKARNGQT

SEQ ID NO: 1338 - protein, 18 aa, synthetic construct
KTINGSGSPHSKAQRRQT

SEQ ID NO: 1339 - protein, 18 aa, synthetic construct
KTINGSGSPHSKWPGQQT

SEQ ID NO: 1340 - protein, 18 aa, synthetic construct
KTINGSGSPHAFLQNQQT

SEQ ID NO: 1341 - protein, 18 aa, synthetic construct
KTINGILSPHRKAQNQQT

SEQ ID NO: 1342 - protein, 18 aa, synthetic construct
KTINGSGSPHSWGSNQQT

SEQ ID NO: 1343 - protein, 18 aa, synthetic construct
KTINGSGSPHSSCLNQQT

SEQ ID NO: 1344 - protein, 18 aa, synthetic construct
KTINGSGSPHSKAQSVKT

SEQ ID NO: 1345 - protein, 18 aa, synthetic construct
KTINGSGSPHSLRYNQQT

SEQ ID NO: 1346 - protein, 18 aa, synthetic construct
KTINGSGSPHSKARKLQT

SEQ ID NO: 1347 - protein, 18 aa, synthetic construct
KHRSGSGSPHSKAQNQQT

SEQ ID NO: 1348 - protein, 18 aa, synthetic construct
KTINGSGSPHSKWSLQQT

SEQ ID NO: 1349 - protein, 18 aa, synthetic construct
KTINGSGSPHSKAQTMRT

SEQ ID NO: 1350 - protein, 18 aa, synthetic construct
KTINGSGSPHSKTIRQQT

SEQ ID NO: 1351 - protein, 18 aa, synthetic construct
KTINGKLSPHMKAQNQQT

SEQ ID NO: 1352 - protein, 18 aa, synthetic construct
KTINGSGSPHSKARPFQT

SEQ ID NO: 1353 - protein, 18 aa, synthetic construct
KTINGSGSPHSKPRVQQT

SEQ ID NO: 1354 - protein, 18 aa, synthetic construct
KTINGSGSPHSKAQVVLT

SEQ ID NO: 1355 - protein, 18 aa, synthetic construct
KTRRSSGSPHSKAQNQQT

SEQ ID NO: 1356 - protein, 18 aa, synthetic construct
KTINGSGSPHSKPSRQQT

SEQ ID NO: 1357 - protein, 18 aa, synthetic construct
KTINGSGSPHSVYRNQQT

SEQ ID NO: 1358 - protein, 18 aa, synthetic construct
KTINGSGSPHSKTCSQQT

SEQ ID NO: 1359 - protein, 18 aa, synthetic construct
KTINGSPSPHRKAQNQQT

SEQ ID NO: 1360 - protein, 18 aa, synthetic construct
KTINGRSSPHFKAQNQQT

SEQ ID NO: 1361 - protein, 18 aa, synthetic construct
KTINGSGSPHSKAQMVRT

SEQ ID NO: 1362 - protein, 18 aa, synthetic construct
KTINGSRSPHCSAQNQQT

SEQ ID NO: 1363 - protein, 18 aa, synthetic construct
KTINGSCSPHLRAQNQQT

SEQ ID NO: 1364 - protein, 18 aa, synthetic construct
KTINGSGSPHSKAQCLFT

SEQ ID NO: 1365 - protein, 18 aa, synthetic construct
KTINGRPSPHVKAQNQQT

SEQ ID NO: 1366 - protein, 18 aa, synthetic construct
KTINGSGSPHSMFPNQQT

SEQ ID NO: 1367 - protein, 18 aa, synthetic construct
KTINGMKSPHSKAQNQQT

SEQ ID NO: 1368 - protein, 18 aa, synthetic construct
KTINGSGSPHSKVRAQQT

SEQ ID NO: 1369 - protein, 18 aa, synthetic construct
KGLVGSGSPHSKAQNQQT

SEQ ID NO: 1370 - protein, 18 aa, synthetic construct
KTINGSRSPHVRAQNQQT

SEQ ID NO: 1371 - protein, 18 aa, synthetic construct
KTIRLRGSPHSKAQNQQT

SEQ ID NO: 1372 - protein, 18 aa, synthetic construct
KPRLGSGSPHSKAQNQQT

SEQ ID NO: 1373 - protein, 18 aa, synthetic construct
KTINGSGSPHSKAWYPQT

SEQ ID NO: 1374 - protein, 18 aa, synthetic construct
KTINGSCSPHVRAQNQQT

SEQ ID NO: 1375 - protein, 18 aa, synthetic construct
KTINGSGSPHSKRNVQQT

SEQ ID NO: 1376 - protein, 18 aa, synthetic construct
KTINGSGSPHSKRGLQQT

SEQ ID NO: 1377 - protein, 18 aa, synthetic construct
KTINGSGSPHSKRLAQQT

SEQ ID NO: 1378 - protein, 18 aa, synthetic construct
KTINGSGSPHSKVTRQQT

SEQ ID NO: 1379 - protein, 18 aa, synthetic construct
KTINGSGSPHTWLQNQQT

SEQ ID NO: 1380 - protein, 18 aa, synthetic construct
KTINGSGSPHSKQRSQQT

SEQ ID NO: 1381 - protein, 18 aa, synthetic construct
KTINGSGSPHSKAQRCST

SEQ ID NO: 1382 - protein, 18 aa, synthetic construct
KTINGSPSPHYLAQNQQT

SEQ ID NO: 1383 - protein, 18 aa, synthetic construct
KTINGRRSPHLKAQNQQT

SEQ ID NO: 1384 - protein, 18 aa, synthetic construct
KTINGSGSPHWSLQNQQT

SEQ ID NO: 1385 - protein, 18 aa, synthetic construct
KTINGVTSPHWKAQNQQT

SEQ ID NO: 1386 - protein, 18 aa, synthetic construct
KTINGSGSPHSKAQTTRT

SEQ ID NO: 1387 - protein, 18 aa, synthetic construct
KTINGSGSPHSKAQLFKT

SEQ ID NO: 1388 - protein, 18 aa, synthetic construct
KTINGSGSPHSKARSYQT

SEQ ID NO: 1389 - protein, 18 aa, synthetic construct
KTINGSGSPHSKLSRQQT

SEQ ID NO: 1390 - protein, 18 aa, synthetic construct
KTINGSGSPHLVFQNQQT

SEQ ID NO: 1391 - protein, 18 aa, synthetic construct
KTINGSGSPHSKAQLVKT

SEQ ID NO: 1392 - protein, 18 aa, synthetic construct
KTINGSGSPHSKAQTGRT

SEQ ID NO: 1393 - protein, 18 aa, synthetic construct
KTINGSGSPHSKARYSQT

SEQ ID NO: 1394 - protein, 18 aa, synthetic construct
KTINGRHSPHLKAQNQQT

SEQ ID NO: 1395 - protein, 18 aa, synthetic construct
KTINGSGSPHSFARNQQT

SEQ ID NO: 1396 - protein, 18 aa, synthetic construct
KTINGSGSPHSSCQNQQT

SEQ ID NO: 1397 - protein, 18 aa, synthetic construct
KTINGSGSPHSLFANQQT

SEQ ID NO: 1398 - protein, 18 aa, synthetic construct
KTINGSGSPHSKRLTQQT

SEQ ID NO: 1399 - protein, 18 aa, synthetic construct
KTINGSGSPHSKAQTART

SEQ ID NO: 1400 - protein, 18 aa, synthetic construct
KTINGSGSPHFLNQNQQT

SEQ ID NO: 1401 - protein, 18 aa, synthetic construct
KTINGSGSPHSKAQLILT

SEQ ID NO: 1402 - protein, 18 aa, synthetic construct
KEVGGSGSPHSKAQNQQT

SEQ ID NO: 1403 - protein, 18 aa, synthetic construct
KTINGSRSPHIRAQNQQT

SEQ ID NO: 1404 - protein, 18 aa, synthetic construct
KTINGSGSPHSSWLNQQT

SEQ ID NO: 1405 - protein, 18 aa, synthetic construct
KTINGSMSPHLYAQNQQT

SEQ ID NO: 1406 - protein, 18 aa, synthetic construct
KTINGMSSPHRKAQNQQT

SEQ ID NO: 1407 - protein, 18 aa, synthetic construct
KTINGSGSPHSKPRPQQT

SEQ ID NO: 1408 - protein, 18 aa, synthetic construct
KTINGSGSPHSGLWNQQT

SEQ ID NO: 1409 - protein, 18 aa, synthetic construct
KTINGSGSPHRWAQNQQT

SEQ ID NO: 1410 - protein, 18 aa, synthetic construct
KTINGSGSPHSKIRLQQT

SEQ ID NO: 1411 - protein, 18 aa, synthetic construct
KTINGSGSPHSKFSCQQT

SEQ ID NO: 1412 - protein, 18 aa, synthetic construct
KTINGSGSPHSKSCAQQT

SEQ ID NO: 1413 - protein, 18 aa, synthetic construct
KTINGSGSPHSKRLMQQT

SEQ ID NO: 1414 - protein, 18 aa, synthetic construct
KTSRCSGSPHSKAQNQQT

SEQ ID NO: 1415 - protein, 18 aa, synthetic construct
KTINGSGSPHSFLLNQQT

SEQ ID NO: 1416 - protein, 18 aa, synthetic construct
KTINGSGSPHCSAQNQQT

SEQ ID NO: 1417 - protein, 18 aa, synthetic construct
KTINGSGSPHSKAQPSKT

SEQ ID NO: 1418 - protein, 18 aa, synthetic construct
KTINGSGSPHSYVRNQQT

SEQ ID NO: 1419 - protein, 18 aa, synthetic construct
KTINGSGSPHSKAQQSRT

SEQ ID NO: 1420 - protein, 18 aa, synthetic construct
KTINGSGSPHSFVVNQQT

SEQ ID NO: 1421 - protein, 18 aa, synthetic construct
KTINGFRSPHSKAQNQQT

SEQ ID NO: 1422 - protein, 18 aa, synthetic construct
KTINGSGSPHSKWLVQQT

SEQ ID NO: 1423 - protein, 18 aa, synthetic construct
KTINGSGSPHSKRTAQQT

SEQ ID NO: 1424 - protein, 18 aa, synthetic construct
KTINGLFSPHRKAQNQQT

SEQ ID NO: 1425 - protein, 18 aa, synthetic construct
KTINTIESPHSKAQNQQT

SEQ ID NO: 1426 - protein, 18 aa, synthetic construct
KRLFGSGSPHSKAQNQQT

SEQ ID NO: 1427 - protein, 18 aa, synthetic construct
KTINGSGSPHSKAPNHLT

SEQ ID NO: 1428 - protein, 18 aa, synthetic construct
KTINGSGSPHLFRQNQQT

SEQ ID NO: 1429 - protein, 18 aa, synthetic construct
KTINGSGSPHSKASRHQT

SEQ ID NO: 1430 - protein, 18 aa, synthetic construct
KTINGSGSPHSKLSWQQT

SEQ ID NO: 1431 - protein, 18 aa, synthetic construct
KETAGSGSPHSKAQNQQT

SEQ ID NO: 1432 - protein, 18 aa, synthetic construct
KTINGHRSPHLKAQNQQT

SEQ ID NO: 1433 - protein, 18 aa, synthetic construct
KTINGSGSPHSKGCLQQT

SEQ ID NO: 1434 - protein, 18 aa, synthetic construct
KTINGSGSPHSKAQVLIT

SEQ ID NO: 1435 - protein, 18 aa, synthetic construct
KTINGSGSPHSKLRSQQT

SEQ ID NO: 1436 - protein, 18 aa, synthetic construct
KTINGTLSPHRKAQNQQT

SEQ ID NO: 1437 - protein, 18 aa, synthetic construct
KTINGSGSPHSTWTNQQT

SEQ ID NO: 1438 - protein, 18 aa, synthetic construct
KTINGSGSPHSKAQCRLT

SEQ ID NO: 1439 - protein, 18 aa, synthetic construct
KTINNLRSPHSKAQNQQT

SEQ ID NO: 1440 - protein, 18 aa, synthetic construct
KTINGSGSPHSKARANQT

SEQ ID NO: 1441 - protein, 18 aa, synthetic construct
KTINGRQSPHTKAQNQQT

SEQ ID NO: 1442 - protein, 18 aa, synthetic construct
KTINSARSPHSKAQNQQT

SEQ ID NO: 1443 - protein, 18 aa, synthetic construct
KTINGCSSPHRKAQNQQT

SEQ ID NO: 1444 - protein, 18 aa, synthetic construct
KTINGSVSPHFMAQNQQT

SEQ ID NO: 1445 - protein, 18 aa, synthetic construct
KTINGSGSPHSLCQNQQT

SEQ ID NO: 1446 - protein, 18 aa, synthetic construct
KTINGSLSPHLFAQNQQT

SEQ ID NO: 1447 - protein, 18 aa, synthetic construct
KTINGSGSPHSKACPLQT

SEQ ID NO: 1448 - protein, 18 aa, synthetic construct
KTINGRTSPHRKAQNQQT

SEQ ID NO: 1449 - protein, 18 aa, synthetic construct
KTINGSGSPHSKRATQQT

SEQ ID NO: 1450 - protein, 18 aa, synthetic construct
KTINGSGSPHSKARIMQT

SEQ ID NO: 1451 - protein, 18 aa, synthetic construct
KTINGSGSPHVTWQNQQT

SEQ ID NO: 1452 - protein, 18 aa, synthetic construct
KTINGSGSPHSKRLPQQT

SEQ ID NO: 1453 - protein, 18 aa, synthetic construct
KTINGSGSPHSKAQGFRT

SEQ ID NO: 1454 - protein, 18 aa, synthetic construct
KTINGSGSPHLYGQNQQT

SEQ ID NO: 1455 - protein, 18 aa, synthetic construct
KTINGSGSPHLSCQNQQT

SEQ ID NO: 1456 - protein, 18 aa, synthetic construct
KTINGSGSPHSKAQFTLT

SEQ ID NO: 1457 - protein, 18 aa, synthetic construct
KTINGSRSPHFKAQNQQT

SEQ ID NO: 1458 - protein, 18 aa, synthetic construct
KTINGRPSPHSKAQNQQT

SEQ ID NO: 1459 - protein, 18 aa, synthetic construct
KTINGFSSPHRKAQNQQT

SEQ ID NO: 1460 - protein, 18 aa, synthetic construct
KTINGRASPHVKAQNQQT

SEQ ID NO: 1461 - protein, 18 aa, synthetic construct
KTINGSGSPHSKAQNEVH

SEQ ID NO: 1462 - protein, 18 aa, synthetic construct
KTINGSGSPHSKRSLQQT

SEQ ID NO: 1463 - protein, 18 aa, synthetic construct
KTINGSGSPHRSRQNQQT

SEQ ID NO: 1464 - protein, 18 aa, synthetic construct
KPPTGSGSPHSKAQNQQT

SEQ ID NO: 1465 - protein, 18 aa, synthetic construct
KTINGSGSPHSKAARTQT

SEQ ID NO: 1466 - protein, 18 aa, synthetic construct
KTINGSGSPHSSWANQQT

SEQ ID NO: 1467 - protein, 18 aa, synthetic construct
KTINGSGSPHSKAQRHAT

SEQ ID NO: 1468 - protein, 18 aa, synthetic construct
KTINSPRSPHSKAQNQQT

SEQ ID NO: 1469 - protein, 18 aa, synthetic construct
KTINGSGSPHSKSERQQT

SEQ ID NO: 1470 - protein, 18 aa, synthetic construct
KTINGSGSPHALFQNQQT

SEQ ID NO: 1471 - protein, 18 aa, synthetic construct
KTINGSGSPHSKAQCYVT

SEQ ID NO: 1472 - protein, 18 aa, synthetic construct
KTINGVASPHRKAQNQQT

SEQ ID NO: 1473 - protein, 18 aa, synthetic construct
KTINGSGSPHSALWNQQT

SEQ ID NO: 1474 - protein, 18 aa, synthetic construct
KTINGSGSPHSKSVRQQT

SEQ ID NO: 1475 - protein, 18 aa, synthetic construct
KTINGSGSPHSHMENQQT

SEQ ID NO: 1476 - protein, 18 aa, synthetic construct
KTINGSGTPHSKAQNQQT

SEQ ID NO: 1477 - protein, 18 aa, synthetic construct
KTINGSGSPHSKTGRQQT

SEQ ID NO: 1478 - protein, 18 aa, synthetic construct
KTINGSGSPHSKAQANRT

SEQ ID NO: 1479 - protein, 18 aa, synthetic construct
KTINGSGSPHSKARFSQT

SEQ ID NO: 1480 - protein, 18 aa, synthetic construct
KYLLGSGSPHSKAQNQQT

SEQ ID NO: 1481 - protein, 18 aa, synthetic construct
KTINGSGSPHCSSQNQQT

SEQ ID NO: 1482 - protein, 18 aa, synthetic construct
KTINGSMSPHRKAQNQQT

SEQ ID NO: 1483 - protein, 18 aa, synthetic construct
KTINGNLSPHRKAQNQQT

SEQ ID NO: 1484 - protein, 18 aa, synthetic construct
KEVAGSGSPHSKAQNQQT

SEQ ID NO: 1485 - protein, 18 aa, synthetic construct
KTINLSRSPHSKAQNQQT

SEQ ID NO: 1486 - protein, 18 aa, synthetic construct
KTINGSGSPHSKARQQQT

SEQ ID NO: 1487 - protein, 18 aa, synthetic construct
KTINGTPSPHRKAQNQQT

SEQ ID NO: 1488 - protein, 18 aa, synthetic construct
KTINGSGSPHSKFKLQQT

SEQ ID NO: 1489 - protein, 18 aa, synthetic construct
KTINGSGSPHSKAWLLQT

SEQ ID NO: 1490 - protein, 18 aa, synthetic construct
KTINGLRSPHSKAQNQQT

SEQ ID NO: 1491 - protein, 18 aa, synthetic construct
KTINGRLSPHRKAQNQQT

SEQ ID NO: 1492 - protein, 18 aa, synthetic construct
KTINGSPSPHLFAQNQQT

SEQ ID NO: 1493 - protein, 18 aa, synthetic construct
KDLRGSGSPHSKAQNQQT

SEQ ID NO: 1494 - protein, 18 aa, synthetic construct
KTINGSGSPHSKAQLAKT

SEQ ID NO: 1495 - protein, 18 aa, synthetic construct
KTINGSGSPHSKPRSQQT

SEQ ID NO: 1496 - protein, 18 aa, synthetic construct
KTINGSGSPHSKKMSQQT

SEQ ID NO: 1497 - protein, 18 aa, synthetic construct
KTINGSGSPHSKAQLIVT

SEQ ID NO: 1498 - protein, 18 aa, synthetic construct
KTINGSGSPHSKARFTQT

SEQ ID NO: 1499 - protein, 18 aa, synthetic construct
KTINGSGSPHPLFQNQQT

SEQ ID NO: 1500 - protein, 18 aa, synthetic construct
KTINGSGSPHSKAQRGMT

SEQ ID NO: 1501 - protein, 18 aa, synthetic construct
KTINGSGSPHSKAQNLRR

SEQ ID NO: 1502 - protein, 18 aa, synthetic construct
KTINGSGSPHSKAQFRVT

SEQ ID NO: 1503 - protein, 18 aa, synthetic construct
KTINGSGSPHSKAFVRQT

SEQ ID NO: 1504 - protein, 18 aa, synthetic construct
KTINGSGSPHSKARLTQT

SEQ ID NO: 1505 - protein, 18 aa, synthetic construct
KTINGSGSPHRFKQNQQT

SEQ ID NO: 1506 - protein, 18 aa, synthetic construct
KTINGSGSPHSKEETQQT

SEQ ID NO: 1507 - protein, 18 aa, synthetic construct
KTINGSGSPHSKTRAQQT

SEQ ID NO: 1508 - protein, 18 aa, synthetic construct
KTINGSGSPHSVSWNQQT

SEQ ID NO: 1509 - protein, 18 aa, synthetic construct
KTINGSGSPHTKWQNQQT

SEQ ID NO: 1510 - protein, 18 aa, synthetic construct
KTINGSNSPHRKAQNQQT

SEQ ID NO: 1511 - protein, 18 aa, synthetic construct
KTINGSGSPHSKAQNKRS

SEQ ID NO: 1512 - protein, 18 aa, synthetic construct
KTINGSGSPHSTRQNQQT

SEQ ID NO: 1513 - protein, 18 aa, synthetic construct
KTINGTRSPHTKAQNQQT

SEQ ID NO: 1514 - protein, 18 aa, synthetic construct
KTINGSGSPHVLFQNQQT

SEQ ID NO: 1515 - protein, 18 aa, synthetic construct
KTINGSVSPHYLAQNQQT

SEQ ID NO: 1516 - protein, 18 aa, synthetic construct
KTINGALSPHRKAQNQQT

SEQ ID NO: 1517 - protein, 18 aa, synthetic construct
KTINGSGSPHSKARLYQT

SEQ ID NO: 1518 - protein, 18 aa, synthetic construct
KTINGSGSPHEHNQNQQT

SEQ ID NO: 1519 - protein, 18 aa, synthetic construct
KTINGVLSPHWKAQNQQT

SEQ ID NO: 1520 - protein, 18 aa, synthetic construct
KTINGSGSPHSKASRQQT

SEQ ID NO: 1521 - protein, 18 aa, synthetic construct
KTINGSGSPHSKRSFQQT

SEQ ID NO: 1522 - protein, 18 aa, synthetic construct
KTINGSGSPHSKRVSQQT

SEQ ID NO: 1523 - protein, 18 aa, synthetic construct
KTINGSGSPHSYSRNQQT

SEQ ID NO: 1524 - protein, 18 aa, synthetic construct
KTINGSGSPHSTVWNQQT

SEQ ID NO: 1525 - protein, 18 aa, synthetic construct
KTINGSGSPHSVLFNQQT

SEQ ID NO: 1526 - protein, 18 aa, synthetic construct
KTINGPLSPHCKAQNQQT

SEQ ID NO: 1527 - protein, 18 aa, synthetic construct
KTINGSGSPHSKRVGQQT

SEQ ID NO: 1528 - protein, 18 aa, synthetic construct
KTINGSGSPHSKLWSQQT

SEQ ID NO: 1529 - protein, 18 aa, synthetic construct
KTINGSGSPHSKAQGVRT

SEQ ID NO: 1530 - protein, 18 aa, synthetic construct
KTINGSVSPHRRAQNQQT

SEQ ID NO: 1531 - protein, 18 aa, synthetic construct
KTINGSGSPHLRFQNQQT

SEQ ID NO: 1532 - protein, 18 aa, synthetic construct
KTINGSASPHVFAQNQQT

SEQ ID NO: 1533 - protein, 18 aa, synthetic construct
KTWVRSGSPHSKAQNQQT

SEQ ID NO: 1534 - protein, 18 aa, synthetic construct
KTINGSGSPHSKARMQQT

SEQ ID NO: 1535 - protein, 18 aa, synthetic construct
KTINGSGSPHSKASRGQT

SEQ ID NO: 1536 - protein, 18 aa, synthetic construct
KTINGSGSPHSKAQVCLT

SEQ ID NO: 1537 - protein, 18 aa, synthetic construct
KTINGSGSPHSKARGVQT

SEQ ID NO: 1538 - protein, 18 aa, synthetic construct
KTINGSGSPHGLWQNQQT

SEQ ID NO: 1539 - protein, 18 aa, synthetic construct
KTINGSGSPHSKAQVWFT

SEQ ID NO: 1540 - protein, 18 aa, synthetic construct
KTINGSGSPHSKAQVTLT

SEQ ID NO: 1541 - protein, 18 aa, synthetic construct
KTINGSGSPHSKAQLRIT

SEQ ID NO: 1542 - protein, 18 aa, synthetic construct
KDSLGSGSPHSKAQNQQT

SEQ ID NO: 1543 - protein, 18 aa, synthetic construct
KTINGSGSPHSKRASQQT

SEQ ID NO: 1544 - protein, 18 aa, synthetic construct
KTINGSGSPHSKRINQQT

SEQ ID NO: 1545 - protein, 18 aa, synthetic construct
KTINGSGSPHSKASKNQT

SEQ ID NO: 1546 - protein, 18 aa, synthetic construct
KTINGSGSPHSKAQLPWT

SEQ ID NO: 1547 - protein, 18 aa, synthetic construct
KTINGSGSPHSKLTRQQT

SEQ ID NO: 1548 - protein, 18 aa, synthetic construct
KTINGSGSPHSKTNRQQT

SEQ ID NO: 1549 - protein, 18 aa, synthetic construct
KTINRVISPHSKAQNQQT

SEQ ID NO: 1550 - protein, 18 aa, synthetic construct
KTINGSGSPHTLWQNQQT

SEQ ID NO: 1551 - protein, 18 aa, synthetic construct
KTINGSGSPHSRRQNQQT

SEQ ID NO: 1552 - protein, 18 aa, synthetic construct
KTINGSGSPHSKGGRQQT

SEQ ID NO: 1553 - protein, 18 aa, synthetic construct
KTINGSESPHDSAQNQQT

SEQ ID NO: 1554 - protein, 18 aa, synthetic construct
KTINGSGSPHSRPRNQQT

SEQ ID NO: 1555 - protein, 18 aa, synthetic construct
KTINGSGSPHSRKQNQQT

SEQ ID NO: 1556 - protein, 18 aa, synthetic construct
KTINGSGSPHSKAQEELT

SEQ ID NO: 1557 - protein, 18 aa, synthetic construct
KTINGWRSPHSKAQNQQT

SEQ ID NO: 1558 - protein, 18 aa, synthetic construct
KTINGSGSPHSLLYNQQT

SEQ ID NO: 1559 - protein, 18 aa, synthetic construct
KTINGSGSPHSFRLNQQT

SEQ ID NO: 1560 - protein, 18 aa, synthetic construct
KTINGSGSPHSKAQFLRT

SEQ ID NO: 1561 - protein, 18 aa, synthetic construct
KTINGSGSPHSKQSRQQT

SEQ ID NO: 1562 - protein, 18 aa, synthetic construct
KTINGSRSPHSKAQNRQT

SEQ ID NO: 1563 - protein, 18 aa, synthetic construct
KTINGRPSPHIKAQNQQT

SEQ ID NO: 1564 - protein, 18 aa, synthetic construct
KTINGSGSPHSKRLVQQT

SEQ ID NO: 1565 - protein, 18 aa, synthetic construct
KGHEGSGSPHSKAQNQQT

SEQ ID NO: 1566 - protein, 18 aa, synthetic construct
KTINGSGSPHSKAQKRST

SEQ ID NO: 1567 - protein, 18 aa, synthetic construct
KTINGSGSPHSYLLNQQT

SEQ ID NO: 1568 - protein, 18 aa, synthetic construct
KTINGSGSPHSKPRGQQT

SEQ ID NO: 1569 - protein, 18 aa, synthetic construct
KTINGSGSPHSKTRLQQT

SEQ ID NO: 1570 - protein, 18 aa, synthetic construct
KTINGSGSPHSKSHRQQT

SEQ ID NO: 1571 - protein, 18 aa, synthetic construct
KEIKGSGSPHSKAQNQQT

SEQ ID NO: 1572 - protein, 18 aa, synthetic construct
KTINGSGSPHSKARGIQT

SEQ ID NO: 1573 - protein, 18 aa, synthetic construct
KTINGYRSPHSKAQNQQT

SEQ ID NO: 1574 - protein, 18 aa, synthetic construct
KTINGSGSPHSKLWTQQT

SEQ ID NO: 1575 - protein, 18 aa, synthetic construct
KTINGSGSPHSKPWLQQT

SEQ ID NO: 1576 - protein, 18 aa, synthetic construct
KTINGSGSPHWSVQNQQT

SEQ ID NO: 1577 - protein, 18 aa, synthetic construct
KTINGSGSPHSKVARQQT

SEQ ID NO: 1578 - protein, 18 aa, synthetic construct
KTINGSGSPHTLFQNQQT

SEQ ID NO: 1579 - protein, 18 aa, synthetic construct
KTINGSCSPHLAAQNQQT

SEQ ID NO: 1580 - protein, 18 aa, synthetic construct
KTINGSGSPHSKTSRQQT

SEQ ID NO: 1581 - protein, 18 aa, synthetic construct
KTINGSGSPHSKAQNARH

SEQ ID NO: 1582 - protein, 18 aa, synthetic construct
KTINGSGSPHSKAQLKLT

SEQ ID NO: 1583 - protein, 18 aa, synthetic construct
KTINGSGSPHSKAQNWRT

SEQ ID NO: 1584 - protein, 18 aa, synthetic construct
KTINGSGSPHFLPQNQQT

SEQ ID NO: 1585 - protein, 18 aa, synthetic construct
KTINGSGSPHSKNVRQQT

SEQ ID NO: 1586 - protein, 18 aa, synthetic construct
KTINGSGSPHFMRQNQQT

SEQ ID NO: 1587 - protein, 18 aa, synthetic construct
KTINGSGSPHGWAQNQQT

SEQ ID NO: 1588 - protein, 18 aa, synthetic construct
KTINGSGSPHFHLQNQQT

SEQ ID NO: 1589 - protein, 18 aa, synthetic construct
KTINGSASPHWSAQNQQT

SEQ ID NO: 1590 - protein, 18 aa, synthetic construct
KTINGSSSPHSWAQNQQT

SEQ ID NO: 1591 - protein, 18 aa, synthetic construct
KTINGSGSPHSKAHRQQT

SEQ ID NO: 1592 - protein, 18 aa, synthetic construct
KTINGSGSPHSKQRVQQT

SEQ ID NO: 1593 - protein, 18 aa, synthetic construct
KTLRRSGSPHSKAQNQQT

SEQ ID NO: 1594 - protein, 18 aa, synthetic construct
KTINGSGSPHSKGVRQQT

SEQ ID NO: 1595 - protein, 18 aa, synthetic construct
KTINGSLSPHTWAQNQQT

SEQ ID NO: 1596 - protein, 18 aa, synthetic construct
KTINGSGSPHSKRALQQT

SEQ ID NO: 1597 - protein, 18 aa, synthetic construct
KTINGSGSPHCLSQNQQT

SEQ ID NO: 1598 - protein, 18 aa, synthetic construct
KTINGSGSPHSKAQSLKT

SEQ ID NO: 1599 - protein, 18 aa, synthetic construct
KTINGSGSPHSFVRNQQT

SEQ ID NO: 1600 - protein, 18 aa, synthetic construct
KTINGSGSPHSIFSNQQT

SEQ ID NO: 1601 - protein, 18 aa, synthetic construct
KTINGSGSPHSKVSRQQT

SEQ ID NO: 1602 - protein, 18 aa, synthetic construct
KTINGSGSPHSKARNKQT

SEQ ID NO: 1603 - protein, 18 aa, synthetic construct
KTINASGSPHSKAQGQQT

SEQ ID NO: 1604 - protein, 18 aa, synthetic construct
KTINGSGSPHSKLRMQQT

SEQ ID NO: 1605 - protein, 18 aa, synthetic construct
KTINGSWSPHMLAQNQQT

SEQ ID NO: 1606 - protein, 18 aa, synthetic construct
KTINGSGSPHSLFPNQQT

SEQ ID NO: 1607 - protein, 18 aa, synthetic construct
KPPLGSGSPHSKAQNQQT

SEQ ID NO: 1608 - protein, 18 aa, synthetic construct
KTINGIASPHRKAQNQQT

SEQ ID NO: 1609 - protein, 18 aa, synthetic construct
KTINGSCSPHSLAQNQQT

SEQ ID NO: 1610 - protein, 18 aa, synthetic construct
KTINGRLSPHFKAQNQQT

SEQ ID NO: 1611 - protein, 18 aa, synthetic construct
KTINGSGSPHSKARMTQT

SEQ ID NO: 1612 - protein, 18 aa, synthetic construct
KTINGSGSPHSKARLQQT

SEQ ID NO: 1613 - protein, 18 aa, synthetic construct
KTINGSGSPHSKWVSQQT

SEQ ID NO: 1614 - protein, 18 aa, synthetic construct
KTINGSGSPHSKKVSQQT

SEQ ID NO: 1615 - protein, 18 aa, synthetic construct
KTINGSGSPHSKAQSYRT

SEQ ID NO: 1616 - protein, 18 aa, synthetic construct
KAFNGSGSPHSKAPNQQT

SEQ ID NO: 1617 - protein, 18 aa, synthetic construct
KTINGSGSPHSKAQYRLT

SEQ ID NO: 1618 - protein, 18 aa, synthetic construct
KTINGSWSPHLVAQNQQT

SEQ ID NO: 1619 - protein, 18 aa, synthetic construct
KTINGSGSPHSWTQNQQT

SEQ ID NO: 1620 - protein, 18 aa, synthetic construct
KTINGSGSPHSKAQSHRT

SEQ ID NO: 1621 - protein, 18 aa, synthetic construct
KGINGSGSPHGKAQNQQT

SEQ ID NO: 1622 - protein, 18 aa, synthetic construct
KTINGSGSPHSKAQNRKL

SEQ ID NO: 1623 - protein, 18 aa, synthetic construct
KTINGRYSPHSKAQNQQT

SEQ ID NO: 1624 - protein, 18 aa, synthetic construct
KTINGSGSPHSKGRSQQT

SEQ ID NO: 1625 - protein, 18 aa, synthetic construct
KTINGSGSPHCVAQNQQT

SEQ ID NO: 1626 - protein, 18 aa, synthetic construct
KTINGSGSPHSKIRPQQT

SEQ ID NO: 1627 - protein, 18 aa, synthetic construct
KTINGSGSPHSKAQSSKT

SEQ ID NO: 1628 - protein, 18 aa, synthetic construct
KTINGSGSPHSKRPFQQT

SEQ ID NO: 1629 - protein, 18 aa, synthetic construct
KTINGSSSPHCLAQNQQT

SEQ ID NO: 1630 - protein, 18 aa, synthetic construct
KTINGTRSPHAKAQNQQT

SEQ ID NO: 1631 - protein, 18 aa, synthetic construct
KTINGSGSPHLLFQNQQT

SEQ ID NO: 1632 - protein, 18 aa, synthetic construct
KTINGRRSPHTKAQNQQT

SEQ ID NO: 1633 - protein, 18 aa, synthetic construct
KTINGSGSPHSKASKQQT

SEQ ID NO: 1634 - protein, 18 aa, synthetic construct
KTINGSGSPHSKAQLGRT

SEQ ID NO: 1635 - protein, 18 aa, synthetic construct
KTINGSGSPHSVFLNQQT

SEQ ID NO: 1636 - protein, 18 aa, synthetic construct
KTINGSGSPHSKSARQQT

SEQ ID NO: 1637 - protein, 18 aa, synthetic construct
KTINGSGSPHSKLRLQQT

SEQ ID NO: 1638 - protein, 18 aa, synthetic construct
KTRKSSGSPHSKAQNQQT

SEQ ID NO: 1639 - protein, 18 aa, synthetic construct
KTINGFRSPHLKAQNQQT

SEQ ID NO: 1640 - protein, 18 aa, synthetic construct
KTINGSGSPHSKRSIQQT

SEQ ID NO: 1641 - protein, 18 aa, synthetic construct
KTINGSGSPHSKGRIQQT

SEQ ID NO: 1642 - protein, 18 aa, synthetic construct
KTINGSRSPHRPAQNQQT

SEQ ID NO: 1643 - protein, 18 aa, synthetic construct
KTINGSGSPHSKLRPQQT

SEQ ID NO: 1644 - protein, 18 aa, synthetic construct
KTINGSGSPHMYAQNQQT

SEQ ID NO: 1645 - protein, 18 aa, synthetic construct
KTINGRTSPHAKAQNQQT

SEQ ID NO: 1646 - protein, 18 aa, synthetic construct
KTINGSGSPHSKAGRGQT

SEQ ID NO: 1647 - protein, 18 aa, synthetic construct
KTINGSGSPHSKLMRQQT

SEQ ID NO: 1648 - protein, 18 aa, synthetic construct
KTINGSGSPHSKANKSQT

SEQ ID NO: 1649 - protein, 18 aa, synthetic construct
KTINGSGSPHSKAVRQQT

SEQ ID NO: 1650 - protein, 18 aa, synthetic construct
KTINGSGSPHSKCLSQQT

SEQ ID NO: 1651 - protein, 18 aa, synthetic construct
KTINGSGSPHSKAQWVLT

SEQ ID NO: 1652 - protein, 18 aa, synthetic construct
KTINGSGSPHSKAQFWVT

SEQ ID NO: 1653 - protein, 18 aa, synthetic construct
KTINGSGSPHSKALCRQT

SEQ ID NO: 1654 - protein, 18 aa, synthetic construct
KEVMGSGSPHSKAQNQQT

SEQ ID NO: 1655 - protein, 18 aa, synthetic construct
KTINGSGSPHSKNTRQQT

SEQ ID NO: 1656 - protein, 18 aa, synthetic construct
KTINGSGSPHTWTQNQQT

SEQ ID NO: 1657 - protein, 18 aa, synthetic construct
KTINGSTSPHWSAQNQQT

SEQ ID NO: 1658 - protein, 18 aa, synthetic construct
KTINGNVSPHRKAQNQQT

SEQ ID NO: 1659 - protein, 18 aa, synthetic construct
KTINGSTSPHLFAQNQQT

SEQ ID NO: 1660 - protein, 18 aa, synthetic construct
KTINGSGSPHSKAQNYRA

SEQ ID NO: 1661 - protein, 18 aa, synthetic construct
KTINGSGSPHSKARGQQT

SEQ ID NO: 1662 - protein, 18 aa, synthetic construct
KTINGSGSPHSKAQNRIR

SEQ ID NO: 1663 - protein, 18 aa, synthetic construct
KTINGSGSPHSKWTLQQT

SEQ ID NO: 1664 - protein, 18 aa, synthetic construct
KTINGSGSPHSKAQMKCT

SEQ ID NO: 1665 - protein, 18 aa, synthetic construct
KTINGSGSPHSLWQNQQT

SEQ ID NO: 1666 - protein, 18 aa, synthetic construct
KTINGSGSPHSKAQLSKT

SEQ ID NO: 1667 - protein, 18 aa, synthetic construct
KTINLIWSPHSKAQNQQT

SEQ ID NO: 1668 - protein, 18 aa, synthetic construct
KTINGSGSPHSKRVLQQT

SEQ ID NO: 1669 - protein, 18 aa, synthetic construct
KTINGSGSPHSKVRVQQT

SEQ ID NO: 1670 - protein, 18 aa, synthetic construct
KTINSRFSPHSKAQNQQT

SEQ ID NO: 1671 - protein, 18 aa, synthetic construct
KRSKGSGSPHSKAQNQQT

SEQ ID NO: 1672 - protein, 18 aa, synthetic construct
KTINGSGSPHRRLQNQQT

SEQ ID NO: 1673 - protein, 18 aa, synthetic construct
KTINGSGSPHSCAQNQQT

SEQ ID NO: 1674 - protein, 18 aa, synthetic construct
KTINGPLSPHRKAQNQQT

SEQ ID NO: 1675 - protein, 18 aa, synthetic construct
KTINGSVSPHLYAQNQQT

SEQ ID NO: 1676 - protein, 18 aa, synthetic construct
KTINGRISPHLKAQNQQT

SEQ ID NO: 1677 - protein, 18 aa, synthetic construct
KTINGSHSPHRKAQNQQT

SEQ ID NO: 1678 - protein, 18 aa, synthetic construct
KTINGSGSPHSKAQVSIT

SEQ ID NO: 1679 - protein, 18 aa, synthetic construct
KTINGSMSPHRRAQNQQT

SEQ ID NO: 1680 - protein, 18 aa, synthetic construct
KTINGRQSPHAKAQNQQT

SEQ ID NO: 1681 - protein, 18 aa, synthetic construct
KTINGSGSPHSKAVWRQT

SEQ ID NO: 1682 - protein, 18 aa, synthetic construct
KQPLGSGSPHSKAQNQQT

SEQ ID NO: 1683 - protein, 18 aa, synthetic construct
KTINGSGSPHSKAQNVKL

SEQ ID NO: 1684 - protein, 18 aa, synthetic construct
KTINGSGSPHSKRGTQQT

SEQ ID NO: 1685 - protein, 18 aa, synthetic construct
KTINGSVSPHYVAQNQQT

SEQ ID NO: 1686 - protein, 18 aa, synthetic construct
KTINGSGSPHSKNLRQQT

SEQ ID NO: 1687 - protein, 18 aa, synthetic construct
KTINGSGSPHSKAQAFRT

SEQ ID NO: 1688 - protein, 18 aa, synthetic construct
KTINGSGSPHSKCSNQQT

SEQ ID NO: 1689 - protein, 18 aa, synthetic construct
KELVGSGSPHSKAQNQQT

SEQ ID NO: 1690 - protein, 18 aa, synthetic construct
KTINGSGSPHSLVFNQQT

SEQ ID NO: 1691 - protein, 18 aa, synthetic construct
KTINGSGSPHSKAQATRT

SEQ ID NO: 1692 - protein, 18 aa, synthetic construct
KTINGTSSPHCKAQNQQT

SEQ ID NO: 1693 - protein, 18 aa, synthetic construct
KTINGSGSPHSKALWRQT

SEQ ID NO: 1694 - protein, 18 aa, synthetic construct
KTINGSGSPHSKAQFSVT

SEQ ID NO: 1695 - protein, 18 aa, synthetic construct
KTINGSGSPHSKLYMQQT

SEQ ID NO: 1696 - protein, 18 aa, synthetic construct
KTINGSLSPHYMAQNQQT

SEQ ID NO: 1697 - protein, 18 aa, synthetic construct
KTINGSGSPHSKAWLMQT

SEQ ID NO: 1698 - protein, 18 aa, synthetic construct
KTINGSGSPHSKSLKQQT

SEQ ID NO: 1699 - protein, 18 aa, synthetic construct
KTINGSGSPHSKAQNTRR

SEQ ID NO: 1700 - protein, 18 aa, synthetic construct
KTINGSGSPHYLLQNQQT

SEQ ID NO: 1701 - protein, 18 aa, synthetic construct
KTINGSGSPHTWSQNQQT

SEQ ID NO: 1702 - protein, 18 aa, synthetic construct
KTINGSGSPHSKTRMQQT

SEQ ID NO: 1703 - protein, 18 aa, synthetic construct
KTINTRPSPHSKAQNQQT

SEQ ID NO: 1704 - protein, 18 aa, synthetic construct
KTINGSGSPHSKAQILVT

SEQ ID NO: 1705 - protein, 18 aa, synthetic construct
KTINGSGSPHSKAQNAKS

SEQ ID NO: 1706 - protein, 18 aa, synthetic construct
KTINGSGSPHSRTYNQQT

SEQ ID NO: 1707 - protein, 18 aa, synthetic construct
KTINGSGSPHSKKGGQQT

SEQ ID NO: 1708 - protein, 18 aa, synthetic construct
KTINGYSSPHRKAQNQQT

SEQ ID NO: 1709 - protein, 18 aa, synthetic construct
KTINGSGSPHWVSQNQQT

SEQ ID NO: 1710 - protein, 18 aa, synthetic construct
KTINGSGSPHSKARLAQT

SEQ ID NO: 1711 - protein, 18 aa, synthetic construct
KTINGMCSPHSKAQNQQT

SEQ ID NO: 1712 - protein, 18 aa, synthetic construct
KTINGSGSPHSKSNKQQT

SEQ ID NO: 1713 - protein, 18 aa, synthetic construct
KTINGSGSPHSKAQFVLT

SEQ ID NO: 1714 - protein, 18 aa, synthetic construct
KTINGSISPHFVAQNQQT

SEQ ID NO: 1715 - protein, 18 aa, synthetic construct
KTINGSGSPHRRMQNQQT

SEQ ID NO: 1716 - protein, 18 aa, synthetic construct
KTINGSGSPHSKAWILQT

SEQ ID NO: 1717 - protein, 18 aa, synthetic construct
KTINGSGSPHSKAQGVKT

SEQ ID NO: 1718 - protein, 18 aa, synthetic construct
KTINGSGSPHSKAQFSLT

SEQ ID NO: 1719 - protein, 18 aa, synthetic construct
KTINMLRSPHSKAQNQQT

SEQ ID NO: 1720 - protein, 18 aa, synthetic construct
KTINGSGSPHSKAQLGKT

SEQ ID NO: 1721 - protein, 18 aa, synthetic construct
KTINGSGSPHSMYLNQQT

SEQ ID NO: 1722 - protein, 18 aa, synthetic construct
KTINGHDSPHVTDQNQQT

SEQ ID NO: 1723 - protein, 18 aa, synthetic construct
KTINGHDSPHKRGQHRQT

SEQ ID NO: 1724 - protein, 18 aa, synthetic construct
KMPEGHDSPHKSGQNQQT

SEQ ID NO: 1725 - protein, 18 aa, synthetic construct
KMEGGHDSPHKSGQNQQT

SEQ ID NO: 1726 - protein, 18 aa, synthetic construct
KMEYGHDSPHKSGQNQQT

SEQ ID NO: 1727 - protein, 18 aa, synthetic construct
KAEWGHDSPHKSGQNQQT

SEQ ID NO: 1728 - protein, 18 aa, synthetic construct
KCEWGHDSPHKSGQNQQT

SEQ ID NO: 1729 - protein, 18 aa, synthetic construct
KANNGQDSPHKSGQNQQT

SEQ ID NO: 1730 - protein, 18 aa, synthetic construct
KTINGHDSPHLCGQNQQT

SEQ ID NO: 1731 - protein, 18 aa, synthetic construct
KIPEGHDSPHKSGQNQQT

SEQ ID NO: 1732 - protein, 18 aa, synthetic construct
KADMGHDSPHKSGQNQQT

SEQ ID NO: 1733 - protein, 18 aa, synthetic construct
KTINGHLSPHYFGQNQQT

SEQ ID NO: 1734 - protein, 18 aa, synthetic construct
KIEYGHDSPHKSGQNQQT

SEQ ID NO: 1735 - protein, 18 aa, synthetic construct
KADYGHDSPHKSGQNQQT

SEQ ID NO: 1736 - protein, 18 aa, synthetic construct
KIETGHDSPHKSGQNQQT

SEQ ID NO: 1737 - protein, 18 aa, synthetic construct
KTINGHDSPHTNGQKQQT

SEQ ID NO: 1738 - protein, 18 aa, synthetic construct
KMEWGHDSPHKSGQNQQT

SEQ ID NO: 1739 - protein, 18 aa, synthetic construct
KTINGHDSPHWLLQNQQT

SEQ ID NO: 1740 - protein, 18 aa, synthetic construct
KCEYGHDSPHKSGQNQQT

SEQ ID NO: 1741 - protein, 18 aa, synthetic construct
KRINGHDSPHKSGQKQQN

SEQ ID NO: 1742 - protein, 18 aa, synthetic construct
KMEIGHDSPHKSGQNQQT

SEQ ID NO: 1743 - protein, 18 aa, synthetic construct
KLEYGHDSPHKSGQNQQT

SEQ ID NO: 1744 - protein, 18 aa, synthetic construct
KADWGHDSPHKSGQNQQT

SEQ ID NO: 1745 - protein, 18 aa, synthetic construct
KIEIGHDSPHKSGQNQQT

SEQ ID NO: 1746 - protein, 18 aa, synthetic construct
KTIKDNDSPHKSGQNQQT

SEQ ID NO: 1747 - protein, 18 aa, synthetic construct
KDIMGHDSPHKSGQNQQT

SEQ ID NO: 1748 - protein, 18 aa, synthetic construct
KFEQGHDSPHKSGQNQQT

SEQ ID NO: 1749 - protein, 18 aa, synthetic construct
KMEFGHDSPHKSGQNQQT

SEQ ID NO: 1750 - protein, 18 aa, synthetic construct
KCDQGHDSPHKSGQNQQT

SEQ ID NO: 1751 - protein, 18 aa, synthetic construct
KLPEGHDSPHKSGQNQQT

SEQ ID NO: 1752 - protein, 18 aa, synthetic construct
KIENGHDSPHKSGQNQQT

SEQ ID NO: 1753 - protein, 18 aa, synthetic construct
KMESGHDSPHKSGQNQQT

SEQ ID NO: 1754 - protein, 18 aa, synthetic construct
KAEIGHDSPHKSGQNQQT

SEQ ID NO: 1755 - protein, 18 aa, synthetic construct
KVEYGHDSPHKSGQNQQT

SEQ ID NO: 1756 - protein, 18 aa, synthetic construct
KIINGHDSPHKSGLTQQT

SEQ ID NO: 1757 - protein, 18 aa, synthetic construct
KTSNGDDSPHKSGRNQQT

SEQ ID NO: 1758 - protein, 18 aa, synthetic construct
KIEVGHDSPHKSGQNQQT

SEQ ID NO: 1759 - protein, 18 aa, synthetic construct
KMEMGHDSPHKSGQNQQT

SEQ ID NO: 1760 - protein, 18 aa, synthetic construct
KAEVGHDSPHKSGQNQQT

SEQ ID NO: 1761 - protein, 18 aa, synthetic construct
KMDAGHDSPHKSGQNQQT

SEQ ID NO: 1762 - protein, 18 aa, synthetic construct
KVEWGHDSPHKSGQNQQT

SEQ ID NO: 1763 - protein, 18 aa, synthetic construct
KAEQGHDSPHKSGQNQQT

SEQ ID NO: 1764 - protein, 18 aa, synthetic construct
KLEWGHDSPHKSGQNQQT

SEQ ID NO: 1765 - protein, 18 aa, synthetic construct
KTINGHPSPHYLGQNQQT

SEQ ID NO: 1766 - protein, 18 aa, synthetic construct
KTINGHLSPHYYGQNQQT

SEQ ID NO: 1767 - protein, 18 aa, synthetic construct
KMELGHDSPHKSGQNQQT

SEQ ID NO: 1768 - protein, 18 aa, synthetic construct
KMETGHDSPHKSGQNQQT

SEQ ID NO: 1769 - protein, 18 aa, synthetic construct
KMEAGHDSPHKSGQNQQT

SEQ ID NO: 1770 - protein, 18 aa, synthetic construct
KTINGHDSPHLLWQNQQT

SEQ ID NO: 1771 - protein, 18 aa, synthetic construct
KTINRQRSPHKSGQNQQT

SEQ ID NO: 1772 - protein, 18 aa, synthetic construct
KIESGHDSPHKSGQNQQT

SEQ ID NO: 1773 - protein, 18 aa, synthetic construct
KTAKDHDSPHKSGQNQQT

SEQ ID NO: 1774 - protein, 18 aa, synthetic construct
KMEVGHDSPHKSGQNQQT

SEQ ID NO: 1775 - protein, 18 aa, synthetic construct
KCEIGHDSPHKSGQNQQT

SEQ ID NO: 1776 - protein, 18 aa, synthetic construct
KATNGHDSPHKSGLNQQT

SEQ ID NO: 1777 - protein, 18 aa, synthetic construct
KMDGGHDSPHKSGQNQQT

SEQ ID NO: 1778 - protein, 18 aa, synthetic construct
KQEVGHDSPHKSGQNQQT

SEQ ID NO: 1779 - protein, 18 aa, synthetic construct
KADQGHDSPHKSGQNQQT

SEQ ID NO: 1780 - protein, 18 aa, synthetic construct
KTINGHESPHKSAQNHQT

SEQ ID NO: 1781 - protein, 18 aa, synthetic construct
KTINGHDSPHKSAQNQWT

SEQ ID NO: 1782 - protein, 18 aa, synthetic construct
KNMNGHDSPHKSGQNTHS

SEQ ID NO: 1783 - protein, 18 aa, synthetic construct
KTPWEHDSPHKSGQNQQT

SEQ ID NO: 1784 - protein, 18 aa, synthetic construct
KTINGHSSPHYFGQNQQT

SEQ ID NO: 1785 - protein, 18 aa, synthetic construct
KIEMGHDSPHKSGQNQQT

SEQ ID NO: 1786 - protein, 18 aa, synthetic construct
KTANEHDSPHKSGQNQQT

SEQ ID NO: 1787 - protein, 18 aa, synthetic construct
KTINGHDSPHKSGRRRQT

SEQ ID NO: 1788 - protein, 18 aa, synthetic construct
KISNGHDSPHKSAQNQQT

SEQ ID NO: 1789 - protein, 18 aa, synthetic construct
KTGNGHDSPHKSGQYQQT

SEQ ID NO: 1790 - protein, 18 aa, synthetic construct
KTINGHYSPHLFGQNQQT

SEQ ID NO: 1791 - protein, 18 aa, synthetic construct
KTINGNYSPHKIGQNQQT

SEQ ID NO: 1792 - protein, 18 aa, synthetic construct
KTINGHDSPHKSRQNDQT

SEQ ID NO: 1793 - protein, 18 aa, synthetic construct
KQQQGHDSPHKSGQNQQT

SEQ ID NO: 1794 - protein, 18 aa, synthetic construct
KTPQDHDSPHKSGQNQQT

SEQ ID NO: 1795 - protein, 18 aa, synthetic construct
KHDWGHDSPHKSGQNQQT

SEQ ID NO: 1796 - protein, 18 aa, synthetic construct
KIEGGHDSPHKSGQNQQT

SEQ ID NO: 1797-1799 - skipped (3 entries)

SEQ ID NO: 1800 - protein, 13 aa, synthetic construct
GHDSPHKSGQNQQ

SEQ ID NO: 1801 - protein, 13 aa, synthetic construct
GSGSPHSKAQNQQ

SEQ ID NO: 1802 - protein, 13 aa, synthetic construct
GSGSPHSKAQNRH

SEQ ID NO: 1803 - protein, 13 aa, synthetic construct
GSGSPHSKVQNQQ

SEQ ID NO: 1804 - protein, 13 aa, synthetic construct
MSGSPHSKAQNQQ

SEQ ID NO: 1805 - protein, 13 aa, synthetic construct
GRGSPHSKAQNQQ

SEQ ID NO: 1806 - protein, 13 aa, synthetic construct
RNGSPHSKAQNQQ

SEQ ID NO: 1807 - protein, 13 aa, synthetic construct
GSGSPHSKARDQQ

SEQ ID NO: 1808 - protein, 13 aa, synthetic construct
GSGSPHSKAPNLQ

SEQ ID NO: 1809 - protein, 13 aa, synthetic construct
TSGSPHSKAQNQQ

SEQ ID NO: 1810 - protein, 13 aa, synthetic construct
GSGSPHSKAHVRQ

SEQ ID NO: 1811 - protein, 13 aa, synthetic construct
GSGSPHSKAPNQH

SEQ ID NO: 1812 - protein, 13 aa, synthetic construct
ISGSPHSKAQNQQ

SEQ ID NO: 1813 - protein, 13 aa, synthetic construct
GPGSPHSKAHNQQ

SEQ ID NO: 1814 - protein, 13 aa, synthetic construct
GSGSPHSKTQSQQ

SEQ ID NO: 1815 - protein, 13 aa, synthetic construct
ESGSPHSKAQNQQ

SEQ ID NO: 1816 - protein, 13 aa, synthetic construct
GSGSPHSKAQPAK

SEQ ID NO: 1817 - protein, 13 aa, synthetic construct
SSGSPHSKAQNQQ

SEQ ID NO: 1818 - protein, 13 aa, synthetic construct
GNGSPHSKAQNQQ

SEQ ID NO: 1819 - protein, 13 aa, synthetic construct
GSGSPHSKSQTQQ

SEQ ID NO: 1820 - protein, 13 aa, synthetic construct
ASGSPHSKAQNQQ

SEQ ID NO: 1821 - protein, 13 aa, synthetic construct
GSGSPHSKAQNLA

SEQ ID NO: 1822 - protein, 13 aa, synthetic construct
GSGSPHSKSQNQL

SEQ ID NO: 1823 - protein, 13 aa, synthetic construct
NSGSPHSKAQNQQ

SEQ ID NO: 1824 - protein, 13 aa, synthetic construct
GSGSPHSKAQGQQ

SEQ ID NO: 1825 - protein, 13 aa, synthetic construct
VSGSPHSKAQNQQ

SEQ ID NO: 1826 - protein, 13 aa, synthetic construct
GSGSPHSKALNRQ

SEQ ID NO: 1827 - protein, 13 aa, synthetic construct
LSGSPHSKAQNQQ

SEQ ID NO: 1828 - protein, 13 aa, synthetic construct
GSGSPHSKAHNQQ

SEQ ID NO: 1829 - protein, 13 aa, synthetic construct
GSGSPHSKTQNQQ

SEQ ID NO: 1830 - protein, 13 aa, synthetic construct
GGGSPHSKAQTQQ

SEQ ID NO: 1831 - protein, 13 aa, synthetic construct
GSGSPHSKAQNPP

SEQ ID NO: 1832 - protein, 13 aa, synthetic construct
GSGSPHSKAQNLQ

SEQ ID NO: 1833 - protein, 13 aa, synthetic construct
GGGSPHSKAQNQQ

SEQ ID NO: 1834 - protein, 13 aa, synthetic construct
GSGSPHSKAQYQQ

SEQ ID NO: 1835 - protein, 13 aa, synthetic construct
GGGSPHSKAQNKQ

SEQ ID NO: 1836 - protein, 13 aa, synthetic construct
GSGSPHSKAQDQE

SEQ ID NO: 1837 - protein, 13 aa, synthetic construct
KSGSPHSKAQNQQ

SEQ ID NO: 1838 - protein, 13 aa, synthetic construct
GGGSPHSKAQNQL

SEQ ID NO: 1839 - protein, 13 aa, synthetic construct
GSGSPHSKAQNHQ

SEQ ID NO: 1840 - protein, 13 aa, synthetic construct
GSGSPHSKAQDQQ

SEQ ID NO: 1841 - protein, 13 aa, synthetic construct
GGGSPHSKSQNQL

SEQ ID NO: 1842 - protein, 13 aa, synthetic construct
GNGSPHSKAQNKQ

SEQ ID NO: 1843 - protein, 13 aa, synthetic construct
GSGSPHSKGHWQQ

SEQ ID NO: 1844 - protein, 13 aa, synthetic construct
GSGSPHSKAPNQQ

SEQ ID NO: 1845 - protein, 13 aa, synthetic construct
GSGSPHSKAQNQL

SEQ ID NO: 1846 - protein, 13 aa, synthetic construct
GSGSPHSKRPEQQ

SEQ ID NO: 1847 - protein, 13 aa, synthetic construct
GSGSPHSKAQRTM

SEQ ID NO: 1848 - protein, 13 aa, synthetic construct
GNGSPHSKAQNQH

SEQ ID NO: 1849 - protein, 13 aa, synthetic construct
HSGSPHSKAQNQQ

SEQ ID NO: 1850 - protein, 13 aa, synthetic construct
GGGSPHSKALNQQ

SEQ ID NO: 1851 - protein, 13 aa, synthetic construct
GSGSPHSKALHQH

SEQ ID NO: 1852 - protein, 13 aa, synthetic construct
GTGSPHSKAQNHQ

SEQ ID NO: 1853 - protein, 13 aa, synthetic construct
GSGSPHSKAQHRI

SEQ ID NO: 1854 - protein, 13 aa, synthetic construct
GSGSPHSKAQYIH

SEQ ID NO: 1855 - protein, 13 aa, synthetic construct
GGGSPHSKAHNQQ

SEQ ID NO: 1856 - protein, 13 aa, synthetic construct
GSGSPHSKAQKFE

SEQ ID NO: 1857 - protein, 13 aa, synthetic construct
ESGSPHSKAQNHQ

SEQ ID NO: 1858 - protein, 13 aa, synthetic construct
GSGSPHSKAQFPS

SEQ ID NO: 1859 - protein, 13 aa, synthetic construct
PSGSPHSKAQNQQ

SEQ ID NO: 1860 - protein, 13 aa, synthetic construct
GNGSPHSKAQNPL

SEQ ID NO: 1861 - protein, 13 aa, synthetic construct
GGGSPHSKAQSQQ

SEQ ID NO: 1862 - protein, 13 aa, synthetic construct
GSGSPHSKAQAIK

SEQ ID NO: 1863 - protein, 13 aa, synthetic construct
GSGSPHSKGQNRQ

SEQ ID NO: 1864 - protein, 13 aa, synthetic construct
GSGSPHSKAQSQQ

SEQ ID NO: 1865 - protein, 13 aa, synthetic construct
GSVSPHGKAQNQL

SEQ ID NO: 1866 - protein, 13 aa, synthetic construct
ASGSPHSKAQNQL

SEQ ID NO: 1867 - protein, 13 aa, synthetic construct
RSGSPHSKAQNQQ

SEQ ID NO: 1868 - protein, 13 aa, synthetic construct
GSGSPHSKAQYQH

SEQ ID NO: 1869 - protein, 13 aa, synthetic construct
GSGSPHTKAQNPQ

SEQ ID NO: 1870 - protein, 13 aa, synthetic construct
GSGSPHSKGQNPP

SEQ ID NO: 1871 - protein, 13 aa, synthetic construct
GSGSPHSKAQHQL

SEQ ID NO: 1872 - protein, 13 aa, synthetic construct
GSGSPHSKAQSPP

SEQ ID NO: 1873 - protein, 13 aa, synthetic construct
GSGSPHSKAQAKL

SEQ ID NO: 1874 - protein, 13 aa, synthetic construct
GSGSPHSKTKSQQ

SEQ ID NO: 1875 - protein, 13 aa, synthetic construct
GSGSPHSKAQDRP

SEQ ID NO: 1876 - protein, 13 aa, synthetic construct
GIGSPHSKAQNLG

SEQ ID NO: 1877 - protein, 13 aa, synthetic construct
GSGSPHSKAQAFH

SEQ ID NO: 1878 - protein, 13 aa, synthetic construct
GSGSPHSKAQKQQ

SEQ ID NO: 1879 - protein, 13 aa, synthetic construct
GSGSPHSKAQNAQ

SEQ ID NO: 1880 - protein, 13 aa, synthetic construct
WSGSPHSKAQNQQ

SEQ ID NO: 1881 - protein, 13 aa, synthetic construct
GSGSPHSKAHNQL

SEQ ID NO: 1882 - protein, 13 aa, synthetic construct
GNGSPHSKAQNHQ

SEQ ID NO: 1883 - protein, 13 aa, synthetic construct
GGGSPHSKAQNLQ

SEQ ID NO: 1884 - protein, 13 aa, synthetic construct
GSGSPHSKAQKLN

SEQ ID NO: 1885 - protein, 13 aa, synthetic construct
GGGSPHSKSQNQH

SEQ ID NO: 1886 - protein, 13 aa, synthetic construct
GSGSPHSKSQNVQ

SEQ ID NO: 1887 - protein, 13 aa, synthetic construct
GSGSPHSKAQAQQ

SEQ ID NO: 1888 - protein, 13 aa, synthetic construct
DSGSPHSKAQNQQ

SEQ ID NO: 1889 - protein, 13 aa, synthetic construct
ASGSPHSKAPNQQ

SEQ ID NO: 1890 - protein, 13 aa, synthetic construct
GSGSPHSKAQTPP

SEQ ID NO: 1891 - protein, 13 aa, synthetic construct
IDGSPHSKAQNQQ

SEQ ID NO: 1892 - protein, 13 aa, synthetic construct
GSGSPHNKAQNHQ

SEQ ID NO: 1893 - protein, 13 aa, synthetic construct
GSGSPHSKAQPPA

SEQ ID NO: 1894 - protein, 13 aa, synthetic construct
GSGSPHSKAQERP

SEQ ID NO: 1895 - protein, 13 aa, synthetic construct
GSGSPHSKAQDLQ

SEQ ID NO: 1896 - protein, 13 aa, synthetic construct
GGGSPHSKAQNPP

SEQ ID NO: 1897 - protein, 13 aa, synthetic construct
GSGSPHSKAQAMH

SEQ ID NO: 1898 - protein, 13 aa, synthetic construct
GSGSPHSKALNQQ

SEQ ID NO: 1899 - protein, 13 aa, synthetic construct
GSGSPHSKAQHPS

SEQ ID NO: 1900 - protein, 13 aa, synthetic construct
GLGSPHSKSQNQQ

SEQ ID NO: 1901 - protein, 13 aa, synthetic construct
GTGSPHSKAQNQQ

SEQ ID NO: 1902 - protein, 13 aa, synthetic construct
GSGSPHSKAPGLQ

SEQ ID NO: 1903 - protein, 13 aa, synthetic construct
GSGSPHSKAQGIR

SEQ ID NO: 1904 - protein, 13 aa, synthetic construct
GSGSPHSKAQAPA

SEQ ID NO: 1905 - protein, 13 aa, synthetic construct
GSGSPHSKSQSQQ

SEQ ID NO: 1906 - protein, 13 aa, synthetic construct
GSGSPHSKAQIPP

SEQ ID NO: 1907 - protein, 13 aa, synthetic construct
GSGSPHSKAQTQL

SEQ ID NO: 1908 - protein, 13 aa, synthetic construct
GSGSPHSKAQAPS

SEQ ID NO: 1909 - protein, 13 aa, synthetic construct
DAGSPHSKAQNQQ

SEQ ID NO: 1910 - protein, 13 aa, synthetic construct
GSGSPHSKGQNQQ

SEQ ID NO: 1911 - protein, 13 aa, synthetic construct
DGGSPHSKAQNQQ

SEQ ID NO: 1912 - protein, 13 aa, synthetic construct
ASGSPHSKAHNQQ

SEQ ID NO: 1913 - protein, 13 aa, synthetic construct
GSGSPHSKAQNTY

SEQ ID NO: 1914 - protein, 13 aa, synthetic construct
GSGSPHSKSQNQH

SEQ ID NO: 1915 - protein, 13 aa, synthetic construct
GGGSPHSKAQDKQ

SEQ ID NO: 1916 - protein, 13 aa, synthetic construct
GSGSPHSKAQNHL

SEQ ID NO: 1917 - protein, 13 aa, synthetic construct
GSGSPHSKAQIGM

SEQ ID NO: 1918 - protein, 13 aa, synthetic construct
GSGSPHSKALNKQ

SEQ ID NO: 1919 - protein, 13 aa, synthetic construct
GGGSPHSKAQNPQ

SEQ ID NO: 1920 - protein, 13 aa, synthetic construct
GTGSPHSKAPNQL

SEQ ID NO: 1921 - protein, 13 aa, synthetic construct
GSGSPHSKAQLQQ

SEQ ID NO: 1922 - protein, 13 aa, synthetic construct
GGGSPHSKAQYQQ

SEQ ID NO: 1923 - protein, 13 aa, synthetic construct
GGGSPHSKAQHQQ

SEQ ID NO: 1924 - protein, 13 aa, synthetic construct
GSGSPHSKAQRMS

SEQ ID NO: 1925 - protein, 13 aa, synthetic construct
GSGSPHSKAQGIL

SEQ ID NO: 1926 - protein, 13 aa, synthetic construct
GSGSPHSKAQDRQ

SEQ ID NO: 1927 - protein, 13 aa, synthetic construct
GSGSPHSKARDWQ

SEQ ID NO: 1928 - protein, 13 aa, synthetic construct
GSGSPHSKAQNTH

SEQ ID NO: 1929 - protein, 13 aa, synthetic construct
GSGSPHSKAQERS

SEQ ID NO: 1930 - protein, 13 aa, synthetic construct
GSGSPHSKAQNYQ

SEQ ID NO: 1931 - protein, 13 aa, synthetic construct
GSGSPHSKAQRTC

SEQ ID NO: 1932 - protein, 13 aa, synthetic construct
GSGSPHSKAQIGH

SEQ ID NO: 1933 - protein, 13 aa, synthetic construct
GSGSPHSKAQGAI

SEQ ID NO: 1934 - protein, 13 aa, synthetic construct
GSGSPHSKAQVPP

SEQ ID NO: 1935 - protein, 13 aa, synthetic construct
GSGSPHSKAQVQQ

SEQ ID NO: 1936 - protein, 13 aa, synthetic construct
GSGSPHSKALMRQ

SEQ ID NO: 1937 - protein, 13 aa, synthetic construct
GSGSPHSKAQYSV

SEQ ID NO: 1938 - protein, 13 aa, synthetic construct
GSGSPHSKVPNLQ

SEQ ID NO: 1939 - protein, 13 aa, synthetic construct
GSGSPHSKAQAIT

SEQ ID NO: 1940 - protein, 13 aa, synthetic construct
GSGSPHSKAQKTL

SEQ ID NO: 1941 - protein, 13 aa, synthetic construct
GSGSPHSKAQNQW

SEQ ID NO: 1942 - protein, 13 aa, synthetic construct
GSGSPHSKAQLHH

SEQ ID NO: 1943 - protein, 13 aa, synthetic construct
GSGSPHSKAQNII

SEQ ID NO: 1944 - protein, 13 aa, synthetic construct
MEGSPHSKAQNQQ

SEQ ID NO: 1945 - protein, 13 aa, synthetic construct
GSGSPHSKAQGHH

SEQ ID NO: 1946 - protein, 13 aa, synthetic construct
GSGSPHSKAQSKV

SEQ ID NO: 1947 - protein, 13 aa, synthetic construct
GSGSPHSKAQLPS

SEQ ID NO: 1948 - protein, 13 aa, synthetic construct
GSGSPHSKAIGKQ

SEQ ID NO: 1949 - protein, 13 aa, synthetic construct
GGGSPHSKSQNQQ

SEQ ID NO: 1950 - protein, 13 aa, synthetic construct
GSGSPHSKAQAIH

SEQ ID NO: 1951 - protein, 13 aa, synthetic construct
GSGSPHSKAQHGL

SEQ ID NO: 1952 - protein, 13 aa, synthetic construct
GSGSPHSKAQFMC

SEQ ID NO: 1953 - protein, 13 aa, synthetic construct
VSGSPHSKAQGQQ

SEQ ID NO: 1954 - protein, 13 aa, synthetic construct
GGGSPHSKAQNQM

SEQ ID NO: 1955 - protein, 13 aa, synthetic construct
GSGSPHSKAQHLQ

SEQ ID NO: 1956 - protein, 13 aa, synthetic construct
ENGSPHSKAQNQQ

SEQ ID NO: 1957 - protein, 13 aa, synthetic construct
GSGSPHSKTQNHQ

SEQ ID NO: 1958 - protein, 13 aa, synthetic construct
GSGSPHSKAQPAR

SEQ ID NO: 1959 - protein, 13 aa, synthetic construct
GSGSPHSKAQSLQ

SEQ ID NO: 1960 - protein, 13 aa, synthetic construct
GSGSPHSKSQSQL

SEQ ID NO: 1961 - protein, 13 aa, synthetic construct
GSASPHSKAHSQQ

SEQ ID NO: 1962 - protein, 13 aa, synthetic construct
GSGSPHSKAQMPS

SEQ ID NO: 1963 - protein, 13 aa, synthetic construct
GSGSPHSKAQGSL

SEQ ID NO: 1964 - protein, 13 aa, synthetic construct
GSGSPHSKSQNQQ

SEQ ID NO: 1965 - protein, 13 aa, synthetic construct
GNGSPHSKSQNQQ

SEQ ID NO: 1966 - protein, 13 aa, synthetic construct
GSGSPHSKAQVPA

SEQ ID NO: 1967 - protein, 13 aa, synthetic construct
GNGSPHSKAQNLQ

SEQ ID NO: 1968 - protein, 13 aa, synthetic construct
GSGSPHSKAQDKQ

SEQ ID NO: 1969 - protein, 13 aa, synthetic construct
GSGSPHSKAHYQQ

SEQ ID NO: 1970 - protein, 13 aa, synthetic construct
GSGSPHSKAQVPS

SEQ ID NO: 1971 - protein, 13 aa, synthetic construct
GGGSPHSKAQNHQ

SEQ ID NO: 1972 - protein, 13 aa, synthetic construct
GSGSPHSKARGEQ

SEQ ID NO: 1973 - protein, 13 aa, synthetic construct
GGGSPHSKAQYQH

SEQ ID NO: 1974 - protein, 13 aa, synthetic construct
GSGSPHSKAPGQQ

SEQ ID NO: 1975 - protein, 13 aa, synthetic construct
KNGSPHSKAQNQQ

SEQ ID NO: 1976 - protein, 13 aa, synthetic construct
GSGSPHSKRLEQQ

SEQ ID NO: 1977 - protein, 13 aa, synthetic construct
GSGSPHSKAQNQS

SEQ ID NO: 1978 - protein, 13 aa, synthetic construct
GSGSPHSKAQKVI

SEQ ID NO: 1979 - protein, 13 aa, synthetic construct
GSGSPHSKAQNND

SEQ ID NO: 1980 - protein, 13 aa, synthetic construct
GSGSPHSKAQSVH

SEQ ID NO: 1981 - protein, 13 aa, synthetic construct
GSGSPHSKAQPLG

SEQ ID NO: 1982 - protein, 13 aa, synthetic construct
KEGSPHSKAQNQQ

SEQ ID NO: 1983 - protein, 13 aa, synthetic construct
GSGSPHSKAHNQE

SEQ ID NO: 1984 - protein, 13 aa, synthetic construct
GSGSPHSKAQIQQ

SEQ ID NO: 1985 - protein, 13 aa, synthetic construct
GSGSPHSKAQVRN

SEQ ID NO: 1986 - protein, 13 aa, synthetic construct
GSGSPHSKAPSNQ

SEQ ID NO: 1987 - protein, 13 aa, synthetic construct
GSGSPHSKAQVGH

SEQ ID NO: 1988 - protein, 13 aa, synthetic construct
GSGSPHSKAQRDI

SEQ ID NO: 1989 - protein, 13 aa, synthetic construct
GSGSPHSKAQMPN

SEQ ID NO: 1990 - protein, 13 aa, synthetic construct
AIGSPHSKAQNQQ

SEQ ID NO: 1991 - protein, 13 aa, synthetic construct
GSGSPHSKARGLQ

SEQ ID NO: 1992 - protein, 13 aa, synthetic construct
GSGSPHSKLQKQQ

SEQ ID NO: 1993 - protein, 13 aa, synthetic construct
GSGSPHSKAPSLQ

SEQ ID NO: 1994 - protein, 13 aa, synthetic construct
GSGSPHSKAQRDQ

SEQ ID NO: 1995 - protein, 13 aa, synthetic construct
GSGSPHSKNRDQQ

SEQ ID NO: 1996 - protein, 13 aa, synthetic construct
GSGSPHSKAQAKG

SEQ ID NO: 1997 - protein, 13 aa, synthetic construct
GSGSPHSKAQSAH

SEQ ID NO: 1998 - protein, 13 aa, synthetic construct
GNGSPHSKSQNQH

SEQ ID NO: 1999 - protein, 13 aa, synthetic construct
GSGSPHSKSQNHQ

SEQ ID NO: 2000 - protein, 13 aa, synthetic construct
RSGSPHSKAQDQQ

SEQ ID NO: 2001 - protein, 13 aa, synthetic construct
GSGSPHSKAQSTM

SEQ ID NO: 2002 - protein, 13 aa, synthetic construct
GSGSPHSKAQREM

SEQ ID NO: 2003 - protein, 13 aa, synthetic construct
GGGSPHSKSQNRQ

SEQ ID NO: 2004 - protein, 13 aa, synthetic construct
GSGSPHSKAQYRA

SEQ ID NO: 2005 - protein, 13 aa, synthetic construct
GGGSPHSKAQRQQ

SEQ ID NO: 2006 - protein, 13 aa, synthetic construct
GSGSPHSKNQWQQ

SEQ ID NO: 2007 - protein, 13 aa, synthetic construct
GSGSPHSKAQRMN

SEQ ID NO: 2008 - protein, 13 aa, synthetic construct
GSGSPHAKAQNHQ

SEQ ID NO: 2009 - protein, 13 aa, synthetic construct
GSGSPHSKAGDSQ

SEQ ID NO: 2010 - protein, 13 aa, synthetic construct
GSGSPHSKLKSQQ

SEQ ID NO: 2011 - protein, 13 aa, synthetic construct
GSGSPHSKAQKIS

SEQ ID NO: 2012 - protein, 13 aa, synthetic construct
GSGSPHSKAPSMQ

SEQ ID NO: 2013 - protein, 13 aa, synthetic construct
GSGSPHSKASPRQ

SEQ ID NO: 2014 - protein, 13 aa, synthetic construct
GSGSPHSKRMEQQ

SEQ ID NO: 2015 - protein, 13 aa, synthetic construct
GSGSPHSKAQYQN

SEQ ID NO: 2016 - protein, 13 aa, synthetic construct
GSGSPHARMQNQQ

SEQ ID NO: 2017 - protein, 13 aa, synthetic construct
GSGSPHVKSQNQQ

SEQ ID NO: 2018 - protein, 13 aa, synthetic construct
GQDSPHKSGQNQQ

SEQ ID NO: 2019 - protein, 13 aa, synthetic construct
GSGSPHASRQNQQ

SEQ ID NO: 2020 - protein, 13 aa, synthetic construct
GSGSPHASRQNKQ

SEQ ID NO: 2021 - protein, 13 aa, synthetic construct
GSGSPHVKIQNQQ

SEQ ID NO: 2022 - protein, 13 aa, synthetic construct
GSGSPHSKAKNQQ

SEQ ID NO: 2023 - protein, 13 aa, synthetic construct
GSGSPHKKNQNQQ

SEQ ID NO: 2024 - protein, 13 aa, synthetic construct
GSGSPHVRMQNQQ

SEQ ID NO: 2025 - protein, 13 aa, synthetic construct
GSGSPHASRQKQQ

SEQ ID NO: 2026 - protein, 13 aa, synthetic construct
GHSSPHRSGQNQQ

SEQ ID NO: 2027 - protein, 13 aa, synthetic construct
GSGSPHTRGQNQQ

SEQ ID NO: 2028 - protein, 13 aa, synthetic construct
CSGSPHSKAQNQQ

SEQ ID NO: 2029 - protein, 13 aa, synthetic construct
GSGSPHRKAQNQQ

SEQ ID NO: 2030 - protein, 13 aa, synthetic construct
GSGSPHSKAQNKQ

SEQ ID NO: 2031 - protein, 13 aa, synthetic construct
GSGSPHSKAQTQQ

SEQ ID NO: 2032 - protein, 13 aa, synthetic construct
CSGSPHKTSQNQQ

SEQ ID NO: 2033 - protein, 13 aa, synthetic construct
CSHSPHKSGQNQQ

SEQ ID NO: 2034 - protein, 13 aa, synthetic construct
GQSSPHRSGQNQQ

SEQ ID NO: 2035 - protein, 13 aa, synthetic construct
GRGSPHASRQNQQ

SEQ ID NO: 2036 - protein, 13 aa, synthetic construct
GSGSPHASRKNQQ

SEQ ID NO: 2037 - protein, 13 aa, synthetic construct
GSGSPHASRQNQH

SEQ ID NO: 2038 - protein, 13 aa, synthetic construct
GSGSPHKFGKNQQ

SEQ ID NO: 2039 - protein, 13 aa, synthetic construct
GSGSPHKFGQKQQ

SEQ ID NO: 2040 - protein, 13 aa, synthetic construct
GSGSPHKFGQNQQ

SEQ ID NO: 2041 - protein, 13 aa, synthetic construct
GSGSPHKIGQNQQ

SEQ ID NO: 2042 - protein, 13 aa, synthetic construct
GSGSPHKLGQNQQ

SEQ ID NO: 2043 - protein, 13 aa, synthetic construct
GSGSPHKTSKNQQ

SEQ ID NO: 2044 - protein, 13 aa, synthetic construct
GSGSPHKTSQKQQ

SEQ ID NO: 2045 - protein, 13 aa, synthetic construct
GSGSPHKTSQNQQ

SEQ ID NO: 2046 - protein, 13 aa, synthetic construct
GSGSPHKTTQNQQ

SEQ ID NO: 2047 - protein, 13 aa, synthetic construct
GSGSPHKTYQNQQ

SEQ ID NO: 2048 - protein, 13 aa, synthetic construct
GSGSPHKYGQNQQ

SEQ ID NO: 2049 - protein, 13 aa, synthetic construct
GSGSPHSKAQHQQ

SEQ ID NO: 2050 - protein, 13 aa, synthetic construct
GSGSPHSKDQNQQ

SEQ ID NO: 2051 - protein, 13 aa, synthetic construct
GSGSPHSKPQNQQ

SEQ ID NO: 2052 - protein, 13 aa, synthetic construct
GSGSPHVRGQKQQ

SEQ ID NO: 2053 - protein, 13 aa, synthetic construct
GSGSPHVRGQNKQ

SEQ ID NO: 2054 - protein, 13 aa, synthetic construct
GSHSPHKRGQNQQ

SEQ ID NO: 2055 - protein, 13 aa, synthetic construct
GSHSPHKSGQKQQ

SEQ ID NO: 2056 - protein, 13 aa, synthetic construct
GSHSPHKSGQNQQ

SEQ ID NO: 2057 - protein, 13 aa, synthetic construct
VSGSPHASRQNQQ

SEQ ID NO: 2058 - protein, 13 aa, synthetic construct
VSGSPHGARQNQQ

SEQ ID NO: 2059 - protein, 13 aa, synthetic construct
VSGSPHKFGQNQQ

SEQ ID NO: 2060 - protein, 13 aa, synthetic construct
GSGSPHSKAQYYV

SEQ ID NO: 2061 - protein, 13 aa, synthetic construct
GSGSPHSKLRRQQ

SEQ ID NO: 2062 - protein, 13 aa, synthetic construct
GSGSPHSKAGCGQ

SEQ ID NO: 2063 - protein, 13 aa, synthetic construct
GSGSPHSRAQNQQ

SEQ ID NO: 2064 - protein, 13 aa, synthetic construct
GSGSPHSKRLRQQ

SEQ ID NO: 2065 - protein, 13 aa, synthetic construct
GSGSPHSLRRNQQ

SEQ ID NO: 2066 - protein, 13 aa, synthetic construct
GSGSPHSRGRNQQ

SEQ ID NO: 2067 - protein, 13 aa, synthetic construct
GSGSPHSSRRNQQ

SEQ ID NO: 2068 - protein, 13 aa, synthetic construct
GSGSPHSKAFRLQ

SEQ ID NO: 2069 - protein, 13 aa, synthetic construct
GSCSPHRKAQNQQ

SEQ ID NO: 2070 - protein, 13 aa, synthetic construct
GSGSPHFLRQNQQ

SEQ ID NO: 2071 - protein, 13 aa, synthetic construct
GSGSPHSLRFNQQ

SEQ ID NO: 2072 - protein, 13 aa, synthetic construct
GSGSPHSKWLLQQ

SEQ ID NO: 2073 - protein, 13 aa, synthetic construct
GSGSPHSKRRLQQ

SEQ ID NO: 2074 - protein, 13 aa, synthetic construct
GSGSPHSKAQRKL

SEQ ID NO: 2075 - protein, 13 aa, synthetic construct
GSGSPHSKALRRQ

SEQ ID NO: 2076 - protein, 13 aa, synthetic construct
GSGSPHSKAQRLR

SEQ ID NO: 2077 - protein, 13 aa, synthetic construct
GSGSPHSKAQRRL

SEQ ID NO: 2078 - protein, 13 aa, synthetic construct
GSGSPHSKARRQQ

SEQ ID NO: 2079 - protein, 13 aa, synthetic construct
GSGSPHSKARRLQ

SEQ ID NO: 2080 - protein, 13 aa, synthetic construct
GSGSPHSKSRRQQ

SEQ ID NO: 2081 - protein, 13 aa, synthetic construct
GLLSPHWKAQNQQ

SEQ ID NO: 2082 - protein, 13 aa, synthetic construct
GSGSPHSKARLRQ

SEQ ID NO: 2083 - protein, 13 aa, synthetic construct
GSGSPHSKASKRQ

SEQ ID NO: 2084 - protein, 13 aa, synthetic construct
GSGSPHVRRQNQQ

SEQ ID NO: 2085 - protein, 13 aa, synthetic construct
GSGSPHSKAQLYR

SEQ ID NO: 2086 - protein, 13 aa, synthetic construct
GSGSPHSKAQLTV

SEQ ID NO: 2087 - protein, 13 aa, synthetic construct
GHDSPHKRGQHRQ

SEQ ID NO: 2088 - protein, 13 aa, synthetic construct
GHDSPHKSGQKQQ

SEQ ID NO: 2089 - protein, 13 aa, synthetic construct
GHDSPHKSGLTQQ

SEQ ID NO: 2090 - protein, 13 aa, synthetic construct
GDDSPHKSGRNQQ

SEQ ID NO: 2091 - protein, 13 aa, synthetic construct
GHDSPHKSGLNQQ

SEQ ID NO: 2092 - protein, 13 aa, synthetic construct
GHESPHKSAQNHQ

SEQ ID NO: 2093 - protein, 13 aa, synthetic construct
GHDSPHKSAQNQW

SEQ ID NO: 2094 - protein, 13 aa, synthetic construct
GHDSPHKSGQNTH

SEQ ID NO: 2095 - protein, 13 aa, synthetic construct
GHDSPHKSGRRRQ

SEQ ID NO: 2096 - protein, 13 aa, synthetic construct
GHDSPHKSAQNQQ

SEQ ID NO: 2097 - protein, 13 aa, synthetic construct
GHDSPHKSGQYQQ

SEQ ID NO: 2098 - protein, 13 aa, synthetic construct
GNYSPHKIGQNQQ

SEQ ID NO: 2099 - protein, 13 aa, synthetic construct
GHDSPHKSRQNDQ

SEQ ID NO: 2100 - protein, 13 aa, synthetic construct
GHDSPHKSGQIRQ

SEQ ID NO: 2101 - protein, 13 aa, synthetic construct
GHDSPHKIGQNQH

SEQ ID NO: 2102 - protein, 13 aa, synthetic construct
GYDSPHKSGQKQQ

SEQ ID NO: 2103 - protein, 13 aa, synthetic construct
GHDSPHKSGQSVQ

SEQ ID NO: 2104 - protein, 13 aa, synthetic construct
GHESPHKSGRSQQ

SEQ ID NO: 2105 - protein, 13 aa, synthetic construct
GHDSPHKSGQNKL

SEQ ID NO: 2106 - protein, 13 aa, synthetic construct
GHDSPHKTGQNQQ

SEQ ID NO: 2107 - protein, 13 aa, synthetic construct
GRGSPHKRGQNQQ

SEQ ID NO: 2108 - protein, 13 aa, synthetic construct
GSGSPHTKAQNPP

SEQ ID NO: 2109 - protein, 13 aa, synthetic construct
GQDSPHKSGQHQQ

SEQ ID NO: 2110 - protein, 13 aa, synthetic construct
GHDSPHKSGQIQH

SEQ ID NO: 2111 - protein, 13 aa, synthetic construct
GHDSPHKSGPRQQ

SEQ ID NO: 2112 - protein, 13 aa, synthetic construct
GHDSPHKSGHTQQ

SEQ ID NO: 2113 - protein, 13 aa, synthetic construct
GHDSPHKSGQRQH

SEQ ID NO: 2114 - protein, 13 aa, synthetic construct
GSGSPHTKAQNQQ

SEQ ID NO: 2115 - protein, 13 aa, synthetic construct
GHDSPHKSAQSQQ

SEQ ID NO: 2116 - protein, 13 aa, synthetic construct
GHESPHKSGQNQQ

SEQ ID NO: 2117 - protein, 13 aa, synthetic construct
GHDSPHKSLQNQQ

SEQ ID NO: 2118 - protein, 13 aa, synthetic construct
GHGSPHSKAQNPQ

SEQ ID NO: 2119 - protein, 13 aa, synthetic construct
GHDSPHKSGRNQE

SEQ ID NO: 2120 - protein, 13 aa, synthetic construct
GHDSPHKSGQTQL

SEQ ID NO: 2121 - protein, 13 aa, synthetic construct
GHDSPHKSEKNQQ

SEQ ID NO: 2122 - protein, 13 aa, synthetic construct
GRDSPHKSGQDQQ

SEQ ID NO: 2123 - protein, 13 aa, synthetic construct
GHDSPHKTGHNQQ

SEQ ID NO: 2124 - protein, 13 aa, synthetic construct
GYDSPHKSGQTQQ

SEQ ID NO: 2125 - protein, 13 aa, synthetic construct
GHESPHKSGQTQQ

SEQ ID NO: 2126 - protein, 13 aa, synthetic construct
GHDSPHKSGQSKQ

SEQ ID NO: 2127 - protein, 13 aa, synthetic construct
GHDSPHKTGQNQP

SEQ ID NO: 2128 - protein, 13 aa, synthetic construct
GHDSPHKSGQSPQ

SEQ ID NO: 2129 - protein, 13 aa, synthetic construct
GNDSPHKSVQNQQ

SEQ ID NO: 2130 - protein, 13 aa, synthetic construct
GHDSPHKSAQNYQ

SEQ ID NO: 2131 - protein, 13 aa, synthetic construct
GSASPHSKALNQQ

SEQ ID NO: 2132 - protein, 13 aa, synthetic construct
GHESPHKSAQNRQ

SEQ ID NO: 2133 - protein, 13 aa, synthetic construct
GQDSPHKIGQNQQ

SEQ ID NO: 2134 - protein, 13 aa, synthetic construct
GHDSPHKSGQNHL

SEQ ID NO: 2135 - protein, 13 aa, synthetic construct
GHDSPHKSGQYQH

SEQ ID NO: 2136 - protein, 13 aa, synthetic construct
GNDSPHKSVQNHQ

SEQ ID NO: 2137 - protein, 13 aa, synthetic construct
GHDSPHKSGQNQW

SEQ ID NO: 2138 - protein, 13 aa, synthetic construct
GHDSPHKSVQNQH

SEQ ID NO: 2139 - protein, 13 aa, synthetic construct
GHDSPHKSGQNQH

SEQ ID NO: 2140 - protein, 13 aa, synthetic construct
GHDSPHKSGQTRQ

SEQ ID NO: 2141 - protein, 13 aa, synthetic construct
GHDSPHKSGQNLH

SEQ ID NO: 2142 - protein, 13 aa, synthetic construct
GHDSPHKSAQNQE

SEQ ID NO: 2143 - protein, 13 aa, synthetic construct
GHDSPHKSGQHLQ

SEQ ID NO: 2144 - protein, 13 aa, synthetic construct
GHDSPHKSRLNQP

SEQ ID NO: 2145 - protein, 13 aa, synthetic construct
GQDSPHKSGQNQD

SEQ ID NO: 2146 - protein, 13 aa, synthetic construct
GHDSPHKSGRNQQ

SEQ ID NO: 2147 - protein, 13 aa, synthetic construct
GHDSPHKSGQNLL

SEQ ID NO: 2148 - protein, 13 aa, synthetic construct
GHDSPHKSGQLVI

SEQ ID NO: 2149 - protein, 13 aa, synthetic construct
GHDSPHKSRQSQQ

SEQ ID NO: 2150 - protein, 13 aa, synthetic construct
GHDSPHKSGRTQE

SEQ ID NO: 2151 - protein, 13 aa, synthetic construct
GHDSPHKSVQTHQ

SEQ ID NO: 2152 - protein, 13 aa, synthetic construct
GHDSPHKSGQNQP

SEQ ID NO: 2153 - protein, 13 aa, synthetic construct
GHDSPHKSGQTQQ

SEQ ID NO: 2154 - protein, 13 aa, synthetic construct
GPDSPHKIGQNQQ

SEQ ID NO: 2155 - protein, 13 aa, synthetic construct
GHDSPHKSVQNQQ

SEQ ID NO: 2156 - protein, 13 aa, synthetic construct
GHDSPHKSRQDQH

SEQ ID NO: 2157 - protein, 13 aa, synthetic construct
GPDSPHKSGQKQQ

SEQ ID NO: 2158 - protein, 13 aa, synthetic construct
GHDSPHKSRQSQH

SEQ ID NO: 2159 - protein, 13 aa, synthetic construct
GHDSPHKSVQNQL

SEQ ID NO: 2160 - protein, 13 aa, synthetic construct
GYDSPHKSGQYQH

SEQ ID NO: 2161 - protein, 13 aa, synthetic construct
GHDSPHKSRQNQQ

SEQ ID NO: 2162 - protein, 13 aa, synthetic construct
GHDSPHKSWVRQQ

SEQ ID NO: 2163 - protein, 13 aa, synthetic construct
GHESPHKSGQNQH

SEQ ID NO: 2164 - protein, 13 aa, synthetic construct
GHDSPHKIGHNQQ

SEQ ID NO: 2165 - protein, 13 aa, synthetic construct
GHDSPHKSNAWQQ

SEQ ID NO: 2166 - protein, 13 aa, synthetic construct
GHDSPHKSGQSVP

SEQ ID NO: 2167 - protein, 13 aa, synthetic construct
GHESPHKSGQNIQ

SEQ ID NO: 2168 - protein, 13 aa, synthetic construct
GHDSPHKSVQNHL

SEQ ID NO: 2169 - protein, 13 aa, synthetic construct
GHDSPHKIGLDQQ

SEQ ID NO: 2170 - protein, 13 aa, synthetic construct
ASGSPHSKAQHQQ

SEQ ID NO: 2171 - protein, 13 aa, synthetic construct
GHDSPHKRGPDQQ

SEQ ID NO: 2172 - protein, 13 aa, synthetic construct
GMGSPHSKTQNQQ

SEQ ID NO: 2173 - protein, 13 aa, synthetic construct
GHDSPHKSGESQQ

SEQ ID NO: 2174 - protein, 13 aa, synthetic construct
GHDSPHKHGQNHQ

SEQ ID NO: 2175 - protein, 13 aa, synthetic construct
GTGSPHSKAQNQL

SEQ ID NO: 2176 - protein, 13 aa, synthetic construct
GHDSPHKSVQNKQ

SEQ ID NO: 2177 - protein, 13 aa, synthetic construct
GQVSPHKSGQNQQ

SEQ ID NO: 2178 - protein, 13 aa, synthetic construct
GHDSPHKSGQRQL

SEQ ID NO: 2179 - protein, 13 aa, synthetic construct
GHDSPHKIGQNQL

SEQ ID NO: 2180 - protein, 13 aa, synthetic construct
GHDSPHKSGQIIV

SEQ ID NO: 2181 - protein, 13 aa, synthetic construct
GYDSPHKSGQKQS

SEQ ID NO: 2182 - protein, 13 aa, synthetic construct
GNGSPHSKAQNQE

SEQ ID NO: 2183 - protein, 13 aa, synthetic construct
GDDSPHKSVQNQQ

SEQ ID NO: 2184 - protein, 13 aa, synthetic construct
GHDSPHKSVQSHQ

SEQ ID NO: 2185 - protein, 13 aa, synthetic construct
GHDSPHKSGQFVV

SEQ ID NO: 2186 - protein, 13 aa, synthetic construct
GHDSPHKSRQNLQ

SEQ ID NO: 2187 - protein, 13 aa, synthetic construct
GHNSPHKSGQNQE

SEQ ID NO: 2188 - protein, 13 aa, synthetic construct
GHDSPHKSGQSQP

SEQ ID NO: 2189 - protein, 13 aa, synthetic construct
GHESPHKSGQNEQ

SEQ ID NO: 2190 - protein, 13 aa, synthetic construct
GHDSPHKSGQNQL

SEQ ID NO: 2191 - protein, 13 aa, synthetic construct
GHDSPHKSAQNLL

SEQ ID NO: 2192 - protein, 13 aa, synthetic construct
ASGSPHSKAINQQ

SEQ ID NO: 2193 - protein, 13 aa, synthetic construct
GNGSPHKRGQNQQ

SEQ ID NO: 2194 - protein, 13 aa, synthetic construct
GHDSPHKSGQSLQ

SEQ ID NO: 2195 - protein, 13 aa, synthetic construct
GHDSPHKSAQNHQ

SEQ ID NO: 2196 - protein, 13 aa, synthetic construct
GHDSPHKSGRNRQ

SEQ ID NO: 2197 - protein, 13 aa, synthetic construct
GHDSPHKYGQNEQ

SEQ ID NO: 2198 - protein, 13 aa, synthetic construct
GNGSPHSKAPNLQ

SEQ ID NO: 2199 - protein, 13 aa, synthetic construct
GHDSPHKSQQNQQ

SEQ ID NO: 2200 - protein, 13 aa, synthetic construct
GHDSPHKSVQSKQ

SEQ ID NO: 2201 - protein, 13 aa, synthetic construct
GNDSPHKIGHNQQ

SEQ ID NO: 2202 - protein, 13 aa, synthetic construct
GGGSPHSKAQDQQ

SEQ ID NO: 2203 - protein, 13 aa, synthetic construct
GQDSPHKSGQNPL

SEQ ID NO: 2204 - protein, 13 aa, synthetic construct
ASGSPHSKAQNHQ

SEQ ID NO: 2205 - protein, 13 aa, synthetic construct
GHDSPHKSGRDQK

SEQ ID NO: 2206 - protein, 13 aa, synthetic construct
GHDSPHKSVHNQQ

SEQ ID NO: 2207 - protein, 13 aa, synthetic construct
GHDSPHKSGQWKR

SEQ ID NO: 2208 - protein, 13 aa, synthetic construct
GSGSPHSKAENRQ

SEQ ID NO: 2209 - protein, 13 aa, synthetic construct
GHDSPHKSGQSQQ

SEQ ID NO: 2210 - protein, 13 aa, synthetic construct
GHDSPHKSRQAQQ

SEQ ID NO: 2211 - protein, 13 aa, synthetic construct
GHDSPHKSVQNHQ

SEQ ID NO: 2212 - protein, 13 aa, synthetic construct
GHDSPHKSKQNQQ

SEQ ID NO: 2213 - protein, 13 aa, synthetic construct
GHDSPHKSAQNQL

SEQ ID NO: 2214 - protein, 13 aa, synthetic construct
GHDSPHKSGQTQP

SEQ ID NO: 2215 - protein, 13 aa, synthetic construct
GHDSPHKLWINQQ

SEQ ID NO: 2216 - protein, 13 aa, synthetic construct
GPDSPHKSGQNQQ

SEQ ID NO: 2217 - protein, 13 aa, synthetic construct
GHDSPHKSVQKQL

SEQ ID NO: 2218 - protein, 13 aa, synthetic construct
GHPSPHWKGQNQQ

SEQ ID NO: 2219 - protein, 13 aa, synthetic construct
GHDSPHKSGRNQL

SEQ ID NO: 2220 - protein, 13 aa, synthetic construct
GSGSPHSKVQDQQ

SEQ ID NO: 2221 - protein, 13 aa, synthetic construct
GHDSPHKMGRNQQ

SEQ ID NO: 2222 - protein, 13 aa, synthetic construct
GHDSPHKSGISIQ

SEQ ID NO: 2223 - protein, 13 aa, synthetic construct
GHDSPHKSVQNLQ

SEQ ID NO: 2224 - protein, 13 aa, synthetic construct
GHDSPHKMAHNQQ

SEQ ID NO: 2225 - protein, 13 aa, synthetic construct
GHDSPHKHGQNQQ

SEQ ID NO: 2226 - protein, 13 aa, synthetic construct
GHDSPHKSVQSQQ

SEQ ID NO: 2227 - protein, 13 aa, synthetic construct
GHDSPHKSGQTVC

SEQ ID NO: 2228 - protein, 13 aa, synthetic construct
GQDSPHKSGQYQQ

SEQ ID NO: 2229 - protein, 13 aa, synthetic construct
GHDSPHKSGQQIM

SEQ ID NO: 2230 - protein, 13 aa, synthetic construct
GHDSPHKSRQNEQ

SEQ ID NO: 2231 - protein, 13 aa, synthetic construct
GHDSPHKSGLNHQ

SEQ ID NO: 2232 - protein, 13 aa, synthetic construct
GYDSPHKSGQNQQ

SEQ ID NO: 2233 - protein, 13 aa, synthetic construct
GHDSPHKSGQNLQ

SEQ ID NO: 2234 - protein, 13 aa, synthetic construct
GHDSPHKSRQDQQ

SEQ ID NO: 2235 - protein, 13 aa, synthetic construct
GDDSPHKSGQKQL

SEQ ID NO: 2236 - protein, 13 aa, synthetic construct
GSGSPHSKAQNQA

SEQ ID NO: 2237 - protein, 13 aa, synthetic construct
GDDSPHKSGHNQQ

SEQ ID NO: 2238 - protein, 13 aa, synthetic construct
GHDSPHKSGQMIH

SEQ ID NO: 2239 - protein, 13 aa, synthetic construct
GHDSPHKSGRNHQ

SEQ ID NO: 2240 - protein, 13 aa, synthetic construct
GHDSPHKSVQNRQ

SEQ ID NO: 2241 - protein, 13 aa, synthetic construct
GHDSPHKSGQKMN

SEQ ID NO: 2242 - protein, 16 aa, synthetic construct
TINGSGSPHSKAQNQQ

SEQ ID NO: 2243 - protein, 16 aa, synthetic construct
TINGHDSPHKSGQNQQ

SEQ ID NO: 2244 - protein, 16 aa, synthetic construct
TIIGSGSPHSKAQNRH

SEQ ID NO: 2245 - protein, 16 aa, synthetic construct
TFPGSGSPHSKVQNQQ

SEQ ID NO: 2246 - protein, 16 aa, synthetic construct
TEKMSGSPHSKAQNQQ

SEQ ID NO: 2247 - protein, 16 aa, synthetic construct
EINGRGSPHSKAQNQQ

SEQ ID NO: 2248 - protein, 16 aa, synthetic construct
TVNRNGSPHSKAQNQQ

SEQ ID NO: 2249 - protein, 16 aa, synthetic construct
TVNGSGSPHSKARDQQ

SEQ ID NO: 2250 - protein, 16 aa, synthetic construct
TFNGSGSPHSKAPNLQ

SEQ ID NO: 2251 - protein, 16 aa, synthetic construct
TEKTSGSPHSKAQNQQ

SEQ ID NO: 2252 - protein, 16 aa, synthetic construct
TINGSGSPHSKAHVRQ

SEQ ID NO: 2253 - protein, 16 aa, synthetic construct
TVNGSGSPHSKAPNQH

SEQ ID NO: 2254 - protein, 16 aa, synthetic construct
TEKISGSPHSKAQNQQ

SEQ ID NO: 2255 - protein, 16 aa, synthetic construct
TINGPGSPHSKAHNQQ

SEQ ID NO: 2256 - protein, 16 aa, synthetic construct
TVNGSGSPHSKTQSQQ

SEQ ID NO: 2257 - protein, 16 aa, synthetic construct
SINESGSPHSKAQNQQ

SEQ ID NO: 2258 - protein, 16 aa, synthetic construct
TERTSGSPHSKAQNQQ

SEQ ID NO: 2259 - protein, 16 aa, synthetic construct
TINGSGSPHSKAQPAK

SEQ ID NO: 2260 - protein, 16 aa, synthetic construct
TEKSSGSPHSKAQNQQ

SEQ ID NO: 2261 - protein, 16 aa, synthetic construct
TSYGNGSPHSKAQNQQ

SEQ ID NO: 2262 - protein, 16 aa, synthetic construct
TEKGSGSPHSKAQNQQ

SEQ ID NO: 2263 - protein, 16 aa, synthetic construct
TINGSGSPHSKSQTQQ

SEQ ID NO: 2264 - protein, 16 aa, synthetic construct
TERISGSPHSKAQNQQ

SEQ ID NO: 2265 - protein, 16 aa, synthetic construct
TERASGSPHSKAQNQQ

SEQ ID NO: 2266 - protein, 16 aa, synthetic construct
ELHGSGSPHSKAQNQQ

SEQ ID NO: 2267 - protein, 16 aa, synthetic construct
AINGSGSPHSKAQNLA

SEQ ID NO: 2268 - protein, 16 aa, synthetic construct
TVNGSGSPHSKSQNQL

SEQ ID NO: 2269 - protein, 16 aa, synthetic construct
TERNSGSPHSKAQNQQ

SEQ ID NO: 2270 - protein, 16 aa, synthetic construct
SVNGNGSPHSKAQNQQ

SEQ ID NO: 2271 - protein, 16 aa, synthetic construct
TFNGSGSPHSKAQGQQ

SEQ ID NO: 2272 - protein, 16 aa, synthetic construct
TERVSGSPHSKAQNQQ

SEQ ID NO: 2273 - protein, 16 aa, synthetic construct
TINGSGSPHSKALNRQ

SEQ ID NO: 2274 - protein, 16 aa, synthetic construct
TERLSGSPHSKAQNQQ

SEQ ID NO: 2275 - protein, 16 aa, synthetic construct
TDNGSGSPHSKAHNQQ

SEQ ID NO: 2276 - protein, 16 aa, synthetic construct
TFHGSGSPHSKTQNQQ

SEQ ID NO: 2277 - protein, 16 aa, synthetic construct
TINGGGSPHSKAQTQQ

SEQ ID NO: 2278 - protein, 16 aa, synthetic construct
TSNGSGSPHSKAQNPP

SEQ ID NO: 2279 - protein, 16 aa, synthetic construct
TINGSGSPHSKAQNLQ

SEQ ID NO: 2280 - protein, 16 aa, synthetic construct
TVHGNGSPHSKAQNQQ

SEQ ID NO: 2281 - protein, 16 aa, synthetic construct
TINGGGSPHSKAQNQQ

SEQ ID NO: 2282 - protein, 16 aa, synthetic construct
TENMSGSPHSKAQNQQ

SEQ ID NO: 2283 - protein, 16 aa, synthetic construct
TENVSGSPHSKAQNQQ

SEQ ID NO: 2284 - protein, 16 aa, synthetic construct
TSSGSGSPHSKAQYQQ

SEQ ID NO: 2285 - protein, 16 aa, synthetic construct
TIDGGGSPHSKAQNKQ

SEQ ID NO: 2286 - protein, 16 aa, synthetic construct
TEKVSGSPHSKAQNQQ

SEQ ID NO: 2287 - protein, 16 aa, synthetic construct
AINGSGSPHSKAQDQE

SEQ ID NO: 2288 - protein, 16 aa, synthetic construct
TCNKSGSPHSKAQNQQ

SEQ ID NO: 2289 - protein, 16 aa, synthetic construct
TINGGGSPHSKAQNQL

SEQ ID NO: 2290 - protein, 16 aa, synthetic construct
NINGGGSPHSKAQNQQ

SEQ ID NO: 2291 - protein, 16 aa, synthetic construct
TEHLSGSPHSKAQNQQ

SEQ ID NO: 2292 - protein, 16 aa, synthetic construct
AEMGSGSPHSKAQNQQ

SEQ ID NO: 2293 - protein, 16 aa, synthetic construct
ATNGSGSPHSKAQNHQ

SEQ ID NO: 2294 - protein, 16 aa, synthetic construct
AIKGSGSPHSKAQDQQ

SEQ ID NO: 2295 - protein, 16 aa, synthetic construct
TINGGGSPHSKSQNQL

SEQ ID NO: 2296 - protein, 16 aa, synthetic construct
TVNGNGSPHSKAQNKQ

SEQ ID NO: 2297 - protein, 16 aa, synthetic construct
TINGSGSPHSKGHWQQ

SEQ ID NO: 2298 - protein, 16 aa, synthetic construct
TDKTSGSPHSKAQNQQ

SEQ ID NO: 2299 - protein, 16 aa, synthetic construct
TFKGSGSPHSKAPNQQ

SEQ ID NO: 2300 - protein, 16 aa, synthetic construct
TVNGSGSPHSKAQNQL

SEQ ID NO: 2301 - protein, 16 aa, synthetic construct
TINGSGSPHSKRPEQQ

SEQ ID NO: 2302 - protein, 16 aa, synthetic construct
TINGSGSPHSKAQRTM

SEQ ID NO: 2303 - protein, 16 aa, synthetic construct
TEKASGSPHSKAQNQQ

SEQ ID NO: 2304 - protein, 16 aa, synthetic construct
SDQGSGSPHSKAQNQQ

SEQ ID NO: 2305 - protein, 16 aa, synthetic construct
TEITSGSPHSKAQNQQ

SEQ ID NO: 2306 - protein, 16 aa, synthetic construct
TDKSSGSPHSKAQNQQ

SEQ ID NO: 2307 - protein, 16 aa, synthetic construct
TIDGSGSPHSKAQNQQ

SEQ ID NO: 2308 - protein, 16 aa, synthetic construct
TVNGNGSPHSKAQNQH

SEQ ID NO: 2309 - protein, 16 aa, synthetic construct
NTNGSGSPHSKAQNQQ

SEQ ID NO: 2310 - protein, 16 aa, synthetic construct
TETHSGSPHSKAQNQQ

SEQ ID NO: 2311 - protein, 16 aa, synthetic construct
TINGGGSPHSKALNQQ

SEQ ID NO: 2312 - protein, 16 aa, synthetic construct
TINGSGSPHSKALHQH

SEQ ID NO: 2313 - protein, 16 aa, synthetic construct
TINGTGSPHSKAQNHQ

SEQ ID NO: 2314 - protein, 16 aa, synthetic construct
TINGSGSPHSKAQHRI

SEQ ID NO: 2315 - protein, 16 aa, synthetic construct
TINGSGSPHSKAQYIH

SEQ ID NO: 2316 - protein, 16 aa, synthetic construct
TENISGSPHSKAQNQQ

SEQ ID NO: 2317 - protein, 16 aa, synthetic construct
TIIGGGSPHSKAHNQQ

SEQ ID NO: 2318 - protein, 16 aa, synthetic construct
TINGSGSPHSKAQKFE

SEQ ID NO: 2319 - protein, 16 aa, synthetic construct
TSNESGSPHSKAQNHQ

SEQ ID NO: 2320 - protein, 16 aa, synthetic construct
TINGSGSPHSKAQFPS

SEQ ID NO: 2321 - protein, 16 aa, synthetic construct
TERPSGSPHSKAQNQQ

SEQ ID NO: 2322 - protein, 16 aa, synthetic construct
TINGNGSPHSKAQNPL

SEQ ID NO: 2323 - protein, 16 aa, synthetic construct
SIKGNGSPHSKAQNQQ

SEQ ID NO: 2324 - protein, 16 aa, synthetic construct
TERMSGSPHSKAQNQQ

SEQ ID NO: 2325 - protein, 16 aa, synthetic construct
TERSSGSPHSKAQNQQ

SEQ ID NO: 2326 - protein, 16 aa, synthetic construct
TELHSGSPHSKAQNQQ

SEQ ID NO: 2327 - protein, 16 aa, synthetic construct
TELTSGSPHSKAQNQQ

SEQ ID NO: 2328 - protein, 16 aa, synthetic construct
TINGSGSPHSKAHNQQ

SEQ ID NO: 2329 - protein, 16 aa, synthetic construct
TINGGGSPHSKAQSQQ

SEQ ID NO: 2330 - protein, 16 aa, synthetic construct
TINGSGSPHSKAQAIK

SEQ ID NO: 2331 - protein, 16 aa, synthetic construct
TENTSGSPHSKAQNQQ

SEQ ID NO: 2332 - protein, 16 aa, synthetic construct
TIDGSGSPHSKGQNRQ

SEQ ID NO: 2333 - protein, 16 aa, synthetic construct
NINGSGSPHSKAQSQQ

SEQ ID NO: 2334 - protein, 16 aa, synthetic construct
TINGSVSPHGKAQNQL

SEQ ID NO: 2335 - protein, 16 aa, synthetic construct
TSNASGSPHSKAQNQL

SEQ ID NO: 2336 - protein, 16 aa, synthetic construct
TEARSGSPHSKAQNQQ

SEQ ID NO: 2337 - protein, 16 aa, synthetic construct
TEKNSGSPHSKAQNQQ

SEQ ID NO: 2338 - protein, 16 aa, synthetic construct
TANGSGSPHSKAQYQQ

SEQ ID NO: 2339 - protein, 16 aa, synthetic construct
TVNGSGSPHSKAQYQH

SEQ ID NO: 2340 - protein, 16 aa, synthetic construct
TINGSGSPHTKAQNPQ

SEQ ID NO: 2341 - protein, 16 aa, synthetic construct
TINGSGSPHSKGQNPP

SEQ ID NO: 2342 - protein, 16 aa, synthetic construct
TIIGSGSPHSKAQHQL

SEQ ID NO: 2343 - protein, 16 aa, synthetic construct
TINGSGSPHSKAQSPP

SEQ ID NO: 2344 - protein, 16 aa, synthetic construct
TIYGSGSPHSKAQNQQ

SEQ ID NO: 2345 - protein, 16 aa, synthetic construct
TINGSGSPHSKAQAKL

SEQ ID NO: 2346 - protein, 16 aa, synthetic construct
TDKNSGSPHSKAQNQQ

SEQ ID NO: 2347 - protein, 16 aa, synthetic construct
TINGSGSPHSKTKSQQ

SEQ ID NO: 2348 - protein, 16 aa, synthetic construct
TINGSGSPHSKAQDRP

SEQ ID NO: 2349 - protein, 16 aa, synthetic construct
TINGIGSPHSKAQNLG

SEQ ID NO: 2350 - protein, 16 aa, synthetic construct
TINGSGSPHSKAQSQQ

SEQ ID NO: 2351 - protein, 16 aa, synthetic construct
TENLSGSPHSKAQNQQ

SEQ ID NO: 2352 - protein, 16 aa, synthetic construct
TINGSGSPHSKAQAFH

SEQ ID NO: 2353 - protein, 16 aa, synthetic construct
TINGSGSPHSKAQKQQ

SEQ ID NO: 2354 - protein, 16 aa, synthetic construct
TFSGSGSPHSKAQNLQ

SEQ ID NO: 2355 - protein, 16 aa, synthetic construct
AINGSGSPHSKAQNAQ

SEQ ID NO: 2356 - protein, 16 aa, synthetic construct
TESWSGSPHSKAQNQQ

SEQ ID NO: 2357 - protein, 16 aa, synthetic construct
TTNGSGSPHSKAHNQL

SEQ ID NO: 2358 - protein, 16 aa, synthetic construct
TVNGNGSPHSKAQNHQ

SEQ ID NO: 2359 - protein, 16 aa, synthetic construct
TEDKSGSPHSKAQNQQ

SEQ ID NO: 2360 - protein, 16 aa, synthetic construct
TESASGSPHSKAQNQQ

SEQ ID NO: 2361 - protein, 16 aa, synthetic construct
TNNGSGSPHSKAQNQQ

SEQ ID NO: 2362 - protein, 16 aa, synthetic construct
TSNGGGSPHSKAQNLQ

SEQ ID NO: 2363 - protein, 16 aa, synthetic construct
TDKMSGSPHSKAQNQQ

SEQ ID NO: 2364 - protein, 16 aa, synthetic construct
EVHGSGSPHSKAQNQQ

SEQ ID NO: 2365 - protein, 16 aa, synthetic construct
TINGSGSPHSKAQKLN

SEQ ID NO: 2366 - protein, 16 aa, synthetic construct
TINGGGSPHSKSQNQH

SEQ ID NO: 2367 - protein, 16 aa, synthetic construct
TVNGGGSPHSKAQSQQ

SEQ ID NO: 2368 - protein, 16 aa, synthetic construct
TTNGSGSPHSKAQYQH

SEQ ID NO: 2369 - protein, 16 aa, synthetic construct
TISGSGSPHSKAQYQH

SEQ ID NO: 2370 - protein, 16 aa, synthetic construct
TESTSGSPHSKAQNQQ

SEQ ID NO: 2371 - protein, 16 aa, synthetic construct
TINGSGSPHSKSQNVQ

SEQ ID NO: 2372 - protein, 16 aa, synthetic construct
SINGSGSPHSKAQAQQ

SEQ ID NO: 2373 - protein, 16 aa, synthetic construct
TVNGSGSPHSKAQNLQ

SEQ ID NO: 2374 - protein, 16 aa, synthetic construct
TVRDSGSPHSKAQNQQ

SEQ ID NO: 2375 - protein, 16 aa, synthetic construct
TFNASGSPHSKAPNQQ

SEQ ID NO: 2376 - protein, 16 aa, synthetic construct
TDRMSGSPHSKAQNQQ

SEQ ID NO: 2377 - protein, 16 aa, synthetic construct
TINGSGSPHSKAQTPP

SEQ ID NO: 2378 - protein, 16 aa, synthetic construct
TIKGSGSPHSKAQNQQ

SEQ ID NO: 2379 - protein, 16 aa, synthetic construct
NHIGSGSPHSKAQNQQ

SEQ ID NO: 2380 - protein, 16 aa, synthetic construct
TINGSGSPHSKAQYQH

SEQ ID NO: 2381 - protein, 16 aa, synthetic construct
TIPIDGSPHSKAQNQQ

SEQ ID NO: 2382 - protein, 16 aa, synthetic construct
TINGSGSPHSKAQGQQ

SEQ ID NO: 2383 - protein, 16 aa, synthetic construct
TFNGSGSPHNKAQNHQ

SEQ ID NO: 2384 - protein, 16 aa, synthetic construct
ESDGSGSPHSKAQNQQ

SEQ ID NO: 2385 - protein, 16 aa, synthetic construct
TINGSGSPHSKAQPPA

SEQ ID NO: 2386 - protein, 16 aa, synthetic construct
TINGSGSPHSKAQERP

SEQ ID NO: 2387 - protein, 16 aa, synthetic construct
TIKGSGSPHSKAQDLQ

SEQ ID NO: 2388 - protein, 16 aa, synthetic construct
TDLKSGSPHSKAQNQQ

SEQ ID NO: 2389 - protein, 16 aa, synthetic construct
TINGGGSPHSKAQNPP

SEQ ID NO: 2390 - protein, 16 aa, synthetic construct
TINGSGSPHSKAQAMH

SEQ ID NO: 2391 - protein, 16 aa, synthetic construct
TVPNSGSPHSKAQNQQ

SEQ ID NO: 2392 - protein, 16 aa, synthetic construct
TVIGSGSPHSKALNQQ

SEQ ID NO: 2393 - protein, 16 aa, synthetic construct
TINGSGSPHSKAQHPS

SEQ ID NO: 2394 - protein, 16 aa, synthetic construct
TINGLGSPHSKSQNQQ

SEQ ID NO: 2395 - protein, 16 aa, synthetic construct
TINGTGSPHSKAQNQQ

SEQ ID NO: 2396 - protein, 16 aa, synthetic construct
TINGSGSPHSKAPGLQ

SEQ ID NO: 2397 - protein, 16 aa, synthetic construct
TINGSGSPHSKAQGIR

SEQ ID NO: 2398 - protein, 16 aa, synthetic construct
TESHSGSPHSKAQNQQ

SEQ ID NO: 2399 - protein, 16 aa, synthetic construct
TINGSGSPHSKAQAPA

SEQ ID NO: 2400 - protein, 16 aa, synthetic construct
TINGSGSPHSKSQSQQ

SEQ ID NO: 2401 - protein, 16 aa, synthetic construct
AEHGSGSPHSKAQNQQ

SEQ ID NO: 2402 - protein, 16 aa, synthetic construct
TEDRSGSPHSKAQNQQ

SEQ ID NO: 2403 - protein, 16 aa, synthetic construct
NCLGSGSPHSKAQNQQ

SEQ ID NO: 2404 - protein, 16 aa, synthetic construct
TDRGSGSPHSKAQNQQ

SEQ ID NO: 2405 - protein, 16 aa, synthetic construct
TINGSGSPHSKAQIPP

SEQ ID NO: 2406 - protein, 16 aa, synthetic construct
TVKGSGSPHSKAQDQQ

SEQ ID NO: 2407 - protein, 16 aa, synthetic construct
NADGSGSPHSKAQNQQ

SEQ ID NO: 2408 - protein, 16 aa, synthetic construct
TDKVSGSPHSKAQNQQ

SEQ ID NO: 2409 - protein, 16 aa, synthetic construct
TITGSGSPHSKAQTQL

SEQ ID NO: 2410 - protein, 16 aa, synthetic construct
TINGSGSPHSKAQAPS

SEQ ID NO: 2411 - protein, 16 aa, synthetic construct
NCVGSGSPHSKAQNQQ

SEQ ID NO: 2412 - protein, 16 aa, synthetic construct
TIRDAGSPHSKAQNQQ

SEQ ID NO: 2413 - protein, 16 aa, synthetic construct
TVKDSGSPHSKAQNQQ

SEQ ID NO: 2414 - protein, 16 aa, synthetic construct
NALGSGSPHSKAQNQQ

SEQ ID NO: 2415 - protein, 16 aa, synthetic construct
VINGSGSPHSKGQNQQ

SEQ ID NO: 2416 - protein, 16 aa, synthetic construct
TVNGGGSPHSKAQNQQ

SEQ ID NO: 2417 - protein, 16 aa, synthetic construct
TIQDGGSPHSKAQNQQ

SEQ ID NO: 2418 - protein, 16 aa, synthetic construct
TISGGGSPHSKAQNQQ

SEQ ID NO: 2419 - protein, 16 aa, synthetic construct
TSNASGSPHSKAHNQQ

SEQ ID NO: 2420 - protein, 16 aa, synthetic construct
TINGSGSPHSKAQNTY

SEQ ID NO: 2421 - protein, 16 aa, synthetic construct
TINGSGSPHSKSQNQH

SEQ ID NO: 2422 - protein, 16 aa, synthetic construct
TINGGGSPHSKAQDKQ

SEQ ID NO: 2423 - protein, 16 aa, synthetic construct
TEFVSGSPHSKAQNQQ

SEQ ID NO: 2424 - protein, 16 aa, synthetic construct
TVNGSGSPHSKAQNHL

SEQ ID NO: 2425 - protein, 16 aa, synthetic construct
TREISGSPHSKAQNQQ

SEQ ID NO: 2426 - protein, 16 aa, synthetic construct
TINGSGSPHSKAQIGM

SEQ ID NO: 2427 - protein, 16 aa, synthetic construct
TIDGSGSPHSKALNKQ

SEQ ID NO: 2428 - protein, 16 aa, synthetic construct
TIIGGGSPHSKAQNPQ

SEQ ID NO: 2429 - protein, 16 aa, synthetic construct
QGEGSGSPHSKAQNQQ

SEQ ID NO: 2430 - protein, 16 aa, synthetic construct
TINGTGSPHSKAPNQL

SEQ ID NO: 2431 - protein, 16 aa, synthetic construct
TVNGSGSPHSKAQLQQ

SEQ ID NO: 2432 - protein, 16 aa, synthetic construct
TFNGGGSPHSKAQYQQ

SEQ ID NO: 2433 - protein, 16 aa, synthetic construct
SINGSGSPHSKTQSQQ

SEQ ID NO: 2434 - protein, 16 aa, synthetic construct
TVNGGGSPHSKAQHQQ

SEQ ID NO: 2435 - protein, 16 aa, synthetic construct
SEKGSGSPHSKAQNQQ

SEQ ID NO: 2436 - protein, 16 aa, synthetic construct
NVNGSGSPHSKAQNQQ

SEQ ID NO: 2437 - protein, 16 aa, synthetic construct
GGEGSGSPHSKAQNQQ

SEQ ID NO: 2438 - protein, 16 aa, synthetic construct
TINGSGSPHSKAQRMS

SEQ ID NO: 2439 - protein, 16 aa, synthetic construct
TINGSGSPHSKAQGIL

SEQ ID NO: 2440 - protein, 16 aa, synthetic construct
EFVGSGSPHSKAQNQQ

SEQ ID NO: 2441 - protein, 16 aa, synthetic construct
TIIGSGSPHSKAQDRQ

SEQ ID NO: 2442 - protein, 16 aa, synthetic construct
SDKGSGSPHSKAQNQQ

SEQ ID NO: 2443 - protein, 16 aa, synthetic construct
TEQVSGSPHSKAQNQQ

SEQ ID NO: 2444 - protein, 16 aa, synthetic construct
TEHVSGSPHSKAQNQQ

SEQ ID NO: 2445 - protein, 16 aa, synthetic construct
TINGSGSPHSKARDWQ

SEQ ID NO: 2446 - protein, 16 aa, synthetic construct
TENASGSPHSKAQNQQ

SEQ ID NO: 2447 - protein, 16 aa, synthetic construct
EVQGSGSPHSKAQNQQ

SEQ ID NO: 2448 - protein, 16 aa, synthetic construct
TINGSGSPHSKAQNTH

SEQ ID NO: 2449 - protein, 16 aa, synthetic construct
TINGSGSPHSKAPNLQ

SEQ ID NO: 2450 - protein, 16 aa, synthetic construct
TINGSGSPHSKAQERS

SEQ ID NO: 2451 - protein, 16 aa, synthetic construct
TSNGSGSPHSKAQNYQ

SEQ ID NO: 2452 - protein, 16 aa, synthetic construct
TEYISGSPHSKAQNQQ

SEQ ID NO: 2453 - protein, 16 aa, synthetic construct
TINGSGSPHSKAQRTC

SEQ ID NO: 2454 - protein, 16 aa, synthetic construct
TINGSGSPHSKAQIGH

SEQ ID NO: 2455 - protein, 16 aa, synthetic construct
NCWGSGSPHSKAQNQQ

SEQ ID NO: 2456 - protein, 16 aa, synthetic construct
TINGSGSPHSKAQGAI

SEQ ID NO: 2457 - protein, 16 aa, synthetic construct
TDVNSGSPHSKAQNQQ

SEQ ID NO: 2458 - protein, 16 aa, synthetic construct
SDIGSGSPHSKAQNQQ

SEQ ID NO: 2459 - protein, 16 aa, synthetic construct
TINGSGSPHSKAQVPP

SEQ ID NO: 2460 - protein, 16 aa, synthetic construct
TINGSGSPHSKAQVQQ

SEQ ID NO: 2461 - protein, 16 aa, synthetic construct
TINGSGSPHSKALMRQ

SEQ ID NO: 2462 - protein, 16 aa, synthetic construct
TINGSGSPHSKAQYSV

SEQ ID NO: 2463 - protein, 16 aa, synthetic construct
NSIGSGSPHSKAQNQQ

SEQ ID NO: 2464 - protein, 16 aa, synthetic construct
TINGSGSPHSKVPNLQ

SEQ ID NO: 2465 - protein, 16 aa, synthetic construct
AINGSGSPHSKAQSQQ

SEQ ID NO: 2466 - protein, 16 aa, synthetic construct
TINGSGSPHSKAQAIT

SEQ ID NO: 2467 - protein, 16 aa, synthetic construct
TINGSGSPHSKAQKTL

SEQ ID NO: 2468 - protein, 16 aa, synthetic construct
TVNGSGSPHSKAQNQW

SEQ ID NO: 2469 - protein, 16 aa, synthetic construct
TINGSGSPHSKAQLHH

SEQ ID NO: 2470 - protein, 16 aa, synthetic construct
TEQTSGSPHSKAQNQQ

SEQ ID NO: 2471 - protein, 16 aa, synthetic construct
TINGSGSPHSKAQNII

SEQ ID NO: 2472 - protein, 16 aa, synthetic construct
NSLGSGSPHSKAQNQQ

SEQ ID NO: 2473 - protein, 16 aa, synthetic construct
TIPMEGSPHSKAQNQQ

SEQ ID NO: 2474 - protein, 16 aa, synthetic construct
TINGSGSPHSKAQGHH

SEQ ID NO: 2475 - protein, 16 aa, synthetic construct
TDRTSGSPHSKAQNQQ

SEQ ID NO: 2476 - protein, 16 aa, synthetic construct
TINGSGSPHSKAQSKV

SEQ ID NO: 2477 - protein, 16 aa, synthetic construct
EVVGSGSPHSKAQNQQ

SEQ ID NO: 2478 - protein, 16 aa, synthetic construct
TINGSGSPHSKAQLPS

SEQ ID NO: 2479 - protein, 16 aa, synthetic construct
TINGSGSPHSKAIGKQ

SEQ ID NO: 2480 - protein, 16 aa, synthetic construct
TEPTSGSPHSKAQNQQ

SEQ ID NO: 2481 - protein, 16 aa, synthetic construct
TVNGGGSPHSKSQNQQ

SEQ ID NO: 2482 - protein, 16 aa, synthetic construct
TINGSGSPHSKAQAIH

SEQ ID NO: 2483 - protein, 16 aa, synthetic construct
TINGSGSPHSKAQHGL

SEQ ID NO: 2484 - protein, 16 aa, synthetic construct
SELGSGSPHSKAQNQQ

SEQ ID NO: 2485 - protein, 16 aa, synthetic construct
TINGSGSPHSKAQFMC

SEQ ID NO: 2486 - protein, 16 aa, synthetic construct
TINVSGSPHSKAQGQQ

SEQ ID NO: 2487 - protein, 16 aa, synthetic construct
TINGGGSPHSKAQNQM

SEQ ID NO: 2488 - protein, 16 aa, synthetic construct
TVNGSGSPHSKAQHLQ

SEQ ID NO: 2489 - protein, 16 aa, synthetic construct
TIRENGSPHSKAQNQQ

SEQ ID NO: 2490 - protein, 16 aa, synthetic construct
TINGSGSPHSKTQNHQ

SEQ ID NO: 2491 - protein, 16 aa, synthetic construct
TINGSGSPHSKAQPAR

SEQ ID NO: 2492 - protein, 16 aa, synthetic construct
TVNGSGSPHSKAQSLQ

SEQ ID NO: 2493 - protein, 16 aa, synthetic construct
TINGSGSPHSKSQSQL

SEQ ID NO: 2494 - protein, 16 aa, synthetic construct
TINGSASPHSKAHSQQ

SEQ ID NO: 2495 - protein, 16 aa, synthetic construct
TWQNSGSPHSKAQNQQ

SEQ ID NO: 2496 - protein, 16 aa, synthetic construct
TINGSGSPHSKAQDRQ

SEQ ID NO: 2497 - protein, 16 aa, synthetic construct
TINGSGSPHSKAQMPS

SEQ ID NO: 2498 - protein, 16 aa, synthetic construct
TNNGGGSPHSKAQNLQ

SEQ ID NO: 2499 - protein, 16 aa, synthetic construct
TINGSGSPHSKAQGSL

SEQ ID NO: 2500 - protein, 16 aa, synthetic construct
TEVTSGSPHSKAQNQQ

SEQ ID NO: 2501 - protein, 16 aa, synthetic construct
SINGGGSPHSKAQYQQ

SEQ ID NO: 2502 - protein, 16 aa, synthetic construct
TVIGSGSPHSKSQNQQ

SEQ ID NO: 2503 - protein, 16 aa, synthetic construct
AVNVSGSPHSKAQNQQ

SEQ ID NO: 2504 - protein, 16 aa, synthetic construct
TVNGNGSPHSKSQNQQ

SEQ ID NO: 2505 - protein, 16 aa, synthetic construct
TDRNSGSPHSKAQNQQ

SEQ ID NO: 2506 - protein, 16 aa, synthetic construct
TINGSGSPHSKAQVPA

SEQ ID NO: 2507 - protein, 16 aa, synthetic construct
GVLGSGSPHSKAQNQQ

SEQ ID NO: 2508 - protein, 16 aa, synthetic construct
TLNGNGSPHSKAQNLQ

SEQ ID NO: 2509 - protein, 16 aa, synthetic construct
AINGSGSPHSKAQDKQ

SEQ ID NO: 2510 - protein, 16 aa, synthetic construct
TSNGSGSPHSKAHYQQ

SEQ ID NO: 2511 - protein, 16 aa, synthetic construct
TINGSGSPHSKAQVPS

SEQ ID NO: 2512 - protein, 16 aa, synthetic construct
TELRSGSPHSKAQNQQ

SEQ ID NO: 2513 - protein, 16 aa, synthetic construct
NINGSGSPHSKAQNHQ

SEQ ID NO: 2514 - protein, 16 aa, synthetic construct
TVNGGGSPHSKAQNHQ

SEQ ID NO: 2515 - protein, 16 aa, synthetic construct
TINGSGSPHSKARGEQ

SEQ ID NO: 2516 - protein, 16 aa, synthetic construct
TINGGGSPHSKAQYQH

SEQ ID NO: 2517 - protein, 16 aa, synthetic construct
TEDLSGSPHSKAQNQQ

SEQ ID NO: 2518 - protein, 16 aa, synthetic construct
TINGSGSPHSKAPGQQ

SEQ ID NO: 2519 - protein, 16 aa, synthetic construct
TIPKNGSPHSKAQNQQ

SEQ ID NO: 2520 - protein, 16 aa, synthetic construct
TINGSGSPHSKAQSLQ

SEQ ID NO: 2521 - protein, 16 aa, synthetic construct
TINGSGSPHSKRLEQQ

SEQ ID NO: 2522 - protein, 16 aa, synthetic construct
TERGSGSPHSKAQNQQ

SEQ ID NO: 2523 - protein, 16 aa, synthetic construct
TVNGSGSPHSKAPNQQ

SEQ ID NO: 2524 - protein, 16 aa, synthetic construct
TSNGSGSPHSKAQNQS

SEQ ID NO: 2525 - protein, 16 aa, synthetic construct
TINGSGSPHSKAQKVI

SEQ ID NO: 2526 - protein, 16 aa, synthetic construct
TEGISGSPHSKAQNQQ

SEQ ID NO: 2527 - protein, 16 aa, synthetic construct
TINGSGSPHSKAQNND

SEQ ID NO: 2528 - protein, 16 aa, synthetic construct
TINGSGSPHSKAQSVH

SEQ ID NO: 2529 - protein, 16 aa, synthetic construct
TINGSGSPHSKAQPLG

SEQ ID NO: 2530 - protein, 16 aa, synthetic construct
TINKEGSPHSKAQNQQ

SEQ ID NO: 2531 - protein, 16 aa, synthetic construct
TCNASGSPHSKAQNQQ

SEQ ID NO: 2532 - protein, 16 aa, synthetic construct
AINGSGSPHSKAHNQE

SEQ ID NO: 2533 - protein, 16 aa, synthetic construct
TEGLSGSPHSKAQNQQ

SEQ ID NO: 2534 - protein, 16 aa, synthetic construct
TRDASGSPHSKAQNQQ

SEQ ID NO: 2535 - protein, 16 aa, synthetic construct
TSNGSGSPHSKAQNLQ

SEQ ID NO: 2536 - protein, 16 aa, synthetic construct
TGNGSGSPHSKAQIQQ

SEQ ID NO: 2537 - protein, 16 aa, synthetic construct
TVNGGGSPHSKAQNLQ

SEQ ID NO: 2538 - protein, 16 aa, synthetic construct
TDRSSGSPHSKAQNQQ

SEQ ID NO: 2539 - protein, 16 aa, synthetic construct
TINGSGSPHSKAQVRN

SEQ ID NO: 2540 - protein, 16 aa, synthetic construct
TINGSGSPHSKAPSNQ

SEQ ID NO: 2541 - protein, 16 aa, synthetic construct
TINGSGSPHSKAQVGH

SEQ ID NO: 2542 - protein, 16 aa, synthetic construct
NAIGSGSPHSKAQNQQ

SEQ ID NO: 2543 - protein, 16 aa, synthetic construct
AENGSGSPHSKAQNQQ

SEQ ID NO: 2544 - protein, 16 aa, synthetic construct
TINGSGSPHSKAQRDI

SEQ ID NO: 2545 - protein, 16 aa, synthetic construct
TINGSGSPHSKAQMPN

SEQ ID NO: 2546 - protein, 16 aa, synthetic construct
TVNGSGSPHSKSQNQQ

SEQ ID NO: 2547 - protein, 16 aa, synthetic construct
TIPAIGSPHSKAQNQQ

SEQ ID NO: 2548 - protein, 16 aa, synthetic construct
TINGSGSPHSKARGLQ

SEQ ID NO: 2549 - protein, 16 aa, synthetic construct
TELGSGSPHSKAQNQQ

SEQ ID NO: 2550 - protein, 16 aa, synthetic construct
AETGSGSPHSKAQNQQ

SEQ ID NO: 2551 - protein, 16 aa, synthetic construct
TINGSGSPHSKLQKQQ

SEQ ID NO: 2552 - protein, 16 aa, synthetic construct
TINGSGSPHSKAPSLQ

SEQ ID NO: 2553 - protein, 16 aa, synthetic construct
TINGSGSPHSKAQRDQ

SEQ ID NO: 2554 - protein, 16 aa, synthetic construct
TDVGSGSPHSKAQNQQ

SEQ ID NO: 2555 - protein, 16 aa, synthetic construct
TINGSGSPHSKNRDQQ

SEQ ID NO: 2556 - protein, 16 aa, synthetic construct
SINGSGSPHSKAPNLQ

SEQ ID NO: 2557 - protein, 16 aa, synthetic construct
TINGSGSPHSKAQAKG

SEQ ID NO: 2558 - protein, 16 aa, synthetic construct
TVNGSGSPHSKAQDKQ

SEQ ID NO: 2559 - protein, 16 aa, synthetic construct
TINGGGSPHSKAQNPQ

SEQ ID NO: 2560 - protein, 16 aa, synthetic construct
TINGSGSPHSKAQSAH

SEQ ID NO: 2561 - protein, 16 aa, synthetic construct
TINGNGSPHSKSQNQH

SEQ ID NO: 2562 - protein, 16 aa, synthetic construct
TVPTSGSPHSKAQNQQ

SEQ ID NO: 2563 - protein, 16 aa, synthetic construct
TIDGSGSPHSKSQNHQ

SEQ ID NO: 2564 - protein, 16 aa, synthetic construct
TDVKSGSPHSKAQNQQ

SEQ ID NO: 2565 - protein, 16 aa, synthetic construct
AINRSGSPHSKAQDQQ

SEQ ID NO: 2566 - protein, 16 aa, synthetic construct
TINGSGSPHSKAQSTM

SEQ ID NO: 2567 - protein, 16 aa, synthetic construct
TVNASGSPHSKAQNQL

SEQ ID NO: 2568 - protein, 16 aa, synthetic construct
TINGSGSPHSKAQREM

SEQ ID NO: 2569 - protein, 16 aa, synthetic construct
TVHGSGSPHSKAQSQQ

SEQ ID NO: 2570 - protein, 16 aa, synthetic construct
TINGGGSPHSKSQNRQ

SEQ ID NO: 2571 - protein, 16 aa, synthetic construct
TINGSGSPHSKAQYRA

SEQ ID NO: 2572 - protein, 16 aa, synthetic construct
TINGGGSPHSKAQRQQ

SEQ ID NO: 2573 - protein, 16 aa, synthetic construct
TEPMSGSPHSKAQNQQ

SEQ ID NO: 2574 - protein, 16 aa, synthetic construct
TINGSGSPHSKNQWQQ

SEQ ID NO: 2575 - protein, 16 aa, synthetic construct
ETAGSGSPHSKAQNQQ

SEQ ID NO: 2576 - protein, 16 aa, synthetic construct
TINGSGSPHSKAQRMN

SEQ ID NO: 2577 - protein, 16 aa, synthetic construct
NNLGSGSPHSKAQNQQ

SEQ ID NO: 2578 - protein, 16 aa, synthetic construct
TINGSGSPHAKAQNHQ

SEQ ID NO: 2579 - protein, 16 aa, synthetic construct
TIIKNGSPHSKAQNQQ

SEQ ID NO: 2580 - protein, 16 aa, synthetic construct
TINGSGSPHSKAGDSQ

SEQ ID NO: 2581 - protein, 16 aa, synthetic construct
TINGSGSPHSKLKSQQ

SEQ ID NO: 2582 - protein, 16 aa, synthetic construct
TINGSGSPHSKAQKIS

SEQ ID NO: 2583 - protein, 16 aa, synthetic construct
TEYNSGSPHSKAQNQQ

SEQ ID NO: 2584 - protein, 16 aa, synthetic construct
TINGSGSPHSKAPSMQ

SEQ ID NO: 2585 - protein, 16 aa, synthetic construct
AINGSGSPHSKAQNQQ

SEQ ID NO: 2586 - protein, 16 aa, synthetic construct
TINGSGSPHSKASPRQ

SEQ ID NO: 2587 - protein, 16 aa, synthetic construct
TINGSGSPHSKRMEQQ

SEQ ID NO: 2588 - protein, 16 aa, synthetic construct
TINGSGSPHSKAQYQN

SEQ ID NO: 2589 - protein, 16 aa, synthetic construct
TINGSGSPHSKAQYYV

SEQ ID NO: 2590 - protein, 16 aa, synthetic construct
TINGSGSPHSKLRRQQ

SEQ ID NO: 2591 - protein, 16 aa, synthetic construct
TINGSGSPHSKAGCGQ

SEQ ID NO: 2592 - protein, 16 aa, synthetic construct
SMNGSGSPHSRAQNQQ

SEQ ID NO: 2593 - protein, 16 aa, synthetic construct
TINGSGSPHSKRLRQQ

SEQ ID NO: 2594 - protein, 16 aa, synthetic construct
TINGSGSPHSLRRNQQ

SEQ ID NO: 2595 - protein, 16 aa, synthetic construct
TINGSGSPHSRGRNQQ

SEQ ID NO: 2596 - protein, 16 aa, synthetic construct
TINGSGSPHSSRRNQQ

SEQ ID NO: 2597 - protein, 16 aa, synthetic construct
TINGSGSPHSKAFRLQ

SEQ ID NO: 2598 - protein, 16 aa, synthetic construct
TINGSCSPHRKAQNQQ

SEQ ID NO: 2599 - protein, 16 aa, synthetic construct
TINGSGSPHFLRQNQQ

SEQ ID NO: 2600 - protein, 16 aa, synthetic construct
TINGSGSPHSLRFNQQ

SEQ ID NO: 2601 - protein, 16 aa, synthetic construct
TINGSGSPHSKWLLQQ

SEQ ID NO: 2602 - protein, 16 aa, synthetic construct
TINGSGSPHSKRRLQQ

SEQ ID NO: 2603 - protein, 16 aa, synthetic construct
TINGSGSPHSKAQRKL

SEQ ID NO: 2604 - protein, 16 aa, synthetic construct
TINGSGSPHSKALRRQ

SEQ ID NO: 2605 - protein, 16 aa, synthetic construct
TINGSGSPHSKAQRLR

SEQ ID NO: 2606 - protein, 16 aa, synthetic construct
YLSGSGSPHSKAQNQQ

SEQ ID NO: 2607 - protein, 16 aa, synthetic construct
TINGSGSPHSKAQRRL

SEQ ID NO: 2608 - protein, 16 aa, synthetic construct
TINGSGSPHSKARRQQ

SEQ ID NO: 2609 - protein, 16 aa, synthetic construct
TINGSGSPHSKARRLQ

SEQ ID NO: 2610 - protein, 16 aa, synthetic construct
TINGSGSPHSKSRRQQ

SEQ ID NO: 2611 - protein, 16 aa, synthetic construct
TINGLLSPHWKAQNQQ

SEQ ID NO: 2612 - protein, 16 aa, synthetic construct
TINGSGSPHSKARLRQ

SEQ ID NO: 2613 - protein, 16 aa, synthetic construct
TINGSGSPHSKASKRQ

SEQ ID NO: 2614 - protein, 16 aa, synthetic construct
TINGSGSPHVRRQNQQ

SEQ ID NO: 2615 - protein, 16 aa, synthetic construct
TINGSGSPHSKAQLYR

SEQ ID NO: 2616 - protein, 16 aa, synthetic construct
GLSGSGSPHSKAQNQQ

SEQ ID NO: 2617 - protein, 16 aa, synthetic construct
TINGSGSPHSKAQLTV

SEQ ID NO: 2618 - protein, 16 aa, synthetic construct
TINGHDSPHKRGQHRQ

SEQ ID NO: 2619 - protein, 16 aa, synthetic construct
MPEGHDSPHKSGQNQQ

SEQ ID NO: 2620 - protein, 16 aa, synthetic construct
MEGGHDSPHKSGQNQQ

SEQ ID NO: 2621 - protein, 16 aa, synthetic construct
MEYGHDSPHKSGQNQQ

SEQ ID NO: 2622 - protein, 16 aa, synthetic construct
AEWGHDSPHKSGQNQQ

SEQ ID NO: 2623 - protein, 16 aa, synthetic construct
CEWGHDSPHKSGQNQQ

SEQ ID NO: 2624 - protein, 16 aa, synthetic construct
ANNGQDSPHKSGQNQQ

SEQ ID NO: 2625 - protein, 16 aa, synthetic construct
IPEGHDSPHKSGQNQQ

SEQ ID NO: 2626 - protein, 16 aa, synthetic construct
ADMGHDSPHKSGQNQQ

SEQ ID NO: 2627 - protein, 16 aa, synthetic construct
IEYGHDSPHKSGQNQQ

SEQ ID NO: 2628 - protein, 16 aa, synthetic construct
ADYGHDSPHKSGQNQQ

SEQ ID NO: 2629 - protein, 16 aa, synthetic construct
IETGHDSPHKSGQNQQ

SEQ ID NO: 2630 - protein, 16 aa, synthetic construct
MEWGHDSPHKSGQNQQ

SEQ ID NO: 2631 - protein, 16 aa, synthetic construct
CEYGHDSPHKSGQNQQ

SEQ ID NO: 2632 - protein, 16 aa, synthetic construct
RINGHDSPHKSGQKQQ

SEQ ID NO: 2633 - protein, 16 aa, synthetic construct
MEIGHDSPHKSGQNQQ

SEQ ID NO: 2634 - protein, 16 aa, synthetic construct
LEYGHDSPHKSGQNQQ

SEQ ID NO: 2635 - protein, 16 aa, synthetic construct
ADWGHDSPHKSGQNQQ

SEQ ID NO: 2636 - protein, 16 aa, synthetic construct
IEIGHDSPHKSGQNQQ

SEQ ID NO: 2637 - protein, 16 aa, synthetic construct
DIMGHDSPHKSGQNQQ

SEQ ID NO: 2638 - protein, 16 aa, synthetic construct
FEQGHDSPHKSGQNQQ

SEQ ID NO: 2639 - protein, 16 aa, synthetic construct
MEFGHDSPHKSGQNQQ

SEQ ID NO: 2640 - protein, 16 aa, synthetic construct
CDQGHDSPHKSGQNQQ

SEQ ID NO: 2641 - protein, 16 aa, synthetic construct
LPEGHDSPHKSGQNQQ

SEQ ID NO: 2642 - protein, 16 aa, synthetic construct
IENGHDSPHKSGQNQQ

SEQ ID NO: 2643 - protein, 16 aa, synthetic construct
MESGHDSPHKSGQNQQ

SEQ ID NO: 2644 - protein, 16 aa, synthetic construct
AEIGHDSPHKSGQNQQ

SEQ ID NO: 2645 - protein, 16 aa, synthetic construct
VEYGHDSPHKSGQNQQ

SEQ ID NO: 2646 - protein, 16 aa, synthetic construct
IINGHDSPHKSGLTQQ

SEQ ID NO: 2647 - protein, 16 aa, synthetic construct
TSNGDDSPHKSGRNQQ

SEQ ID NO: 2648 - protein, 16 aa, synthetic construct
IEVGHDSPHKSGQNQQ

SEQ ID NO: 2649 - protein, 16 aa, synthetic construct
MEMGHDSPHKSGQNQQ

SEQ ID NO: 2650 - protein, 16 aa, synthetic construct
AEVGHDSPHKSGQNQQ

SEQ ID NO: 2651 - protein, 16 aa, synthetic construct
MDAGHDSPHKSGQNQQ

SEQ ID NO: 2652 - protein, 16 aa, synthetic construct
VEWGHDSPHKSGQNQQ

SEQ ID NO: 2653 - protein, 16 aa, synthetic construct
AEQGHDSPHKSGQNQQ

SEQ ID NO: 2654 - protein, 16 aa, synthetic construct
LEWGHDSPHKSGQNQQ

SEQ ID NO: 2655 - protein, 16 aa, synthetic construct
MELGHDSPHKSGQNQQ

SEQ ID NO: 2656 - protein, 16 aa, synthetic construct
METGHDSPHKSGQNQQ

SEQ ID NO: 2657 - protein, 16 aa, synthetic construct
MEAGHDSPHKSGQNQQ

SEQ ID NO: 2658 - protein, 16 aa, synthetic construct
IESGHDSPHKSGQNQQ

SEQ ID NO: 2659 - protein, 16 aa, synthetic construct
MEVGHDSPHKSGQNQQ

SEQ ID NO: 2660 - protein, 16 aa, synthetic construct
CEIGHDSPHKSGQNQQ

SEQ ID NO: 2661 - protein, 16 aa, synthetic construct
ATNGHDSPHKSGLNQQ

SEQ ID NO: 2662 - protein, 16 aa, synthetic construct
MDGGHDSPHKSGQNQQ

SEQ ID NO: 2663 - protein, 16 aa, synthetic construct
QEVGHDSPHKSGQNQQ

SEQ ID NO: 2664 - protein, 16 aa, synthetic construct
ADQGHDSPHKSGQNQQ

SEQ ID NO: 2665 - protein, 16 aa, synthetic construct
TINGHESPHKSAQNHQ

SEQ ID NO: 2666 - protein, 16 aa, synthetic construct
TINGHDSPHKSAQNQW

SEQ ID NO: 2667 - protein, 16 aa, synthetic construct
NMNGHDSPHKSGQNTH

SEQ ID NO: 2668 - protein, 16 aa, synthetic construct
IEMGHDSPHKSGQNQQ

SEQ ID NO: 2669 - protein, 16 aa, synthetic construct
TINGHDSPHKSGRRRQ

SEQ ID NO: 2670 - protein, 16 aa, synthetic construct
ISNGHDSPHKSAQNQQ

SEQ ID NO: 2671 - protein, 16 aa, synthetic construct
TGNGHDSPHKSGQYQQ

SEQ ID NO: 2672 - protein, 16 aa, synthetic construct
TINGNYSPHKIGQNQQ

SEQ ID NO: 2673 - protein, 16 aa, synthetic construct
TINGHDSPHKSRQNDQ

SEQ ID NO: 2674 - protein, 16 aa, synthetic construct
QQQGHDSPHKSGQNQQ

SEQ ID NO: 2675 - protein, 16 aa, synthetic construct
HDWGHDSPHKSGQNQQ

SEQ ID NO: 2676 - protein, 16 aa, synthetic construct
IEGGHDSPHKSGQNQQ

SEQ ID NO: 2677 - protein, 16 aa, synthetic construct
TFNRSGSPHSKAQNQQ

SEQ ID NO: 2678 - protein, 16 aa, synthetic construct
AINGHDSPHKSGQIRQ

SEQ ID NO: 2679 - protein, 16 aa, synthetic construct
TINGHDSPHKIGQNQH

SEQ ID NO: 2680 - protein, 16 aa, synthetic construct
AINGYDSPHKSGQKQQ

SEQ ID NO: 2681 - protein, 16 aa, synthetic construct
TESGHDSPHKSGQNQQ

SEQ ID NO: 2682 - protein, 16 aa, synthetic construct
TINGHDSPHKSGQSVQ

SEQ ID NO: 2683 - protein, 16 aa, synthetic construct
TINGHESPHKSGRSQQ

SEQ ID NO: 2684 - protein, 16 aa, synthetic construct
TINGHDSPHKSGQNKL

SEQ ID NO: 2685 - protein, 16 aa, synthetic construct
TINGHDSPHKTGQNQQ

SEQ ID NO: 2686 - protein, 16 aa, synthetic construct
TINGRGSPHKRGQNQQ

SEQ ID NO: 2687 - protein, 16 aa, synthetic construct
TINGSGSPHTKAQNPP

SEQ ID NO: 2688 - protein, 16 aa, synthetic construct
TINGQDSPHKSGQHQQ

SEQ ID NO: 2689 - protein, 16 aa, synthetic construct
SINGHDSPHKSGQIQH

SEQ ID NO: 2690 - protein, 16 aa, synthetic construct
AINGHDSPHKSGPRQQ

SEQ ID NO: 2691 - protein, 16 aa, synthetic construct
TVNGHDSPHKSGHTQQ

SEQ ID NO: 2692 - protein, 16 aa, synthetic construct
SINGHDSPHKSGQRQH

SEQ ID NO: 2693 - protein, 16 aa, synthetic construct
SLNGSGSPHTKAQNQQ

SEQ ID NO: 2694 - protein, 16 aa, synthetic construct
AINGHDSPHKSAQSQQ

SEQ ID NO: 2695 - protein, 16 aa, synthetic construct
SIYGHESPHKSGQNQQ

SEQ ID NO: 2696 - protein, 16 aa, synthetic construct
TVNGHDSPHKSLQNQQ

SEQ ID NO: 2697 - protein, 16 aa, synthetic construct
TINGHGSPHSKAQNPQ

SEQ ID NO: 2698 - protein, 16 aa, synthetic construct
TSNGYDSPHKSGQKQQ

SEQ ID NO: 2699 - protein, 16 aa, synthetic construct
TVNGHDSPHKSGRNQE

SEQ ID NO: 2700 - protein, 16 aa, synthetic construct
TTNGHDSPHKSGQTQL

SEQ ID NO: 2701 - protein, 16 aa, synthetic construct
AINGHDSPHKSEKNQQ

SEQ ID NO: 2702 - protein, 16 aa, synthetic construct
IINGRDSPHKSGQDQQ

SEQ ID NO: 2703 - protein, 16 aa, synthetic construct
TISGHDSPHKTGHNQQ

SEQ ID NO: 2704 - protein, 16 aa, synthetic construct
SINGYDSPHKSGQTQQ

SEQ ID NO: 2705 - protein, 16 aa, synthetic construct
TINGHESPHKSGQTQQ

SEQ ID NO: 2706 - protein, 16 aa, synthetic construct
TINGHDSPHKSGQSKQ

SEQ ID NO: 2707 - protein, 16 aa, synthetic construct
AIIGHESPHKSGQNQQ

SEQ ID NO: 2708 - protein, 16 aa, synthetic construct
TINGHDSPHKTGQNQP

SEQ ID NO: 2709 - protein, 16 aa, synthetic construct
AINGHDSPHKSGQSPQ

SEQ ID NO: 2710 - protein, 16 aa, synthetic construct
TIKGNDSPHKSVQNQQ

SEQ ID NO: 2711 - protein, 16 aa, synthetic construct
TEFGHDSPHKSGQNQQ

SEQ ID NO: 2712 - protein, 16 aa, synthetic construct
TINGHDSPHKSAQNYQ

SEQ ID NO: 2713 - protein, 16 aa, synthetic construct
TFNGSASPHSKALNQQ

SEQ ID NO: 2714 - protein, 16 aa, synthetic construct
TINGHESPHKSAQNRQ

SEQ ID NO: 2715 - protein, 16 aa, synthetic construct
TTNGHDSPHKSGQNQQ

SEQ ID NO: 2716 - protein, 16 aa, synthetic construct
TIKGQDSPHKIGQNQQ

SEQ ID NO: 2717 - protein, 16 aa, synthetic construct
TVNGHDSPHKSGQNHL

SEQ ID NO: 2718 - protein, 16 aa, synthetic construct
SINGHDSPHKSGQYQH

SEQ ID NO: 2719 - protein, 16 aa, synthetic construct
TINGNDSPHKSVQNHQ

SEQ ID NO: 2720 - protein, 16 aa, synthetic construct
TITGHDSPHKSGQNQW

SEQ ID NO: 2721 - protein, 16 aa, synthetic construct
TNNGHDSPHKSVQNQH

SEQ ID NO: 2722 - protein, 16 aa, synthetic construct
TIDGHDSPHKSGQNQH

SEQ ID NO: 2723 - protein, 16 aa, synthetic construct
TVNGHDSPHKSGQTRQ

SEQ ID NO: 2724 - protein, 16 aa, synthetic construct
TVNGHDSPHKSGQNLH

SEQ ID NO: 2725 - protein, 16 aa, synthetic construct
AISGHDSPHKSGLNQQ

SEQ ID NO: 2726 - protein, 16 aa, synthetic construct
AINGHDSPHKSAQNQE

SEQ ID NO: 2727 - protein, 16 aa, synthetic construct
TITGHDSPHKSGQHLQ

SEQ ID NO: 2728 - protein, 16 aa, synthetic construct
TINGHDSPHKSRLNQP

SEQ ID NO: 2729 - protein, 16 aa, synthetic construct
TVDGHDSPHKSGQKQQ

SEQ ID NO: 2730 - protein, 16 aa, synthetic construct
TINGQDSPHKSGQNQD

SEQ ID NO: 2731 - protein, 16 aa, synthetic construct
TIEGHDSPHKSGRNQQ

SEQ ID NO: 2732 - protein, 16 aa, synthetic construct
TTNGHDSPHKSGQNLL

SEQ ID NO: 2733 - protein, 16 aa, synthetic construct
TINGHDSPHKSGQLVI

SEQ ID NO: 2734 - protein, 16 aa, synthetic construct
TVNGHDSPHKSRQSQQ

SEQ ID NO: 2735 - protein, 16 aa, synthetic construct
TINGHDSPHKSGRTQE

SEQ ID NO: 2736 - protein, 16 aa, synthetic construct
TINGHDSPHKSVQTHQ

SEQ ID NO: 2737 - protein, 16 aa, synthetic construct
TSNGHDSPHKSGQNQP

SEQ ID NO: 2738 - protein, 16 aa, synthetic construct
VINGHDSPHKSGQTQQ

SEQ ID NO: 2739 - protein, 16 aa, synthetic construct
TINGPDSPHKIGQNQQ

SEQ ID NO: 2740 - protein, 16 aa, synthetic construct
AVNGHDSPHKSVQNQQ

SEQ ID NO: 2741 - protein, 16 aa, synthetic construct
TINGHDSPHKSRQDQH

SEQ ID NO: 2742 - protein, 16 aa, synthetic construct
AINGPDSPHKSGQKQQ

SEQ ID NO: 2743 - protein, 16 aa, synthetic construct
TINGHDSPHKSRQSQH

SEQ ID NO: 2744 - protein, 16 aa, synthetic construct
TIYGHDSPHKSVQNQL

SEQ ID NO: 2745 - protein, 16 aa, synthetic construct
TVNGHDSPHKSGQNLL

SEQ ID NO: 2746 - protein, 16 aa, synthetic construct
TENKSGSPHSKAQNQQ

SEQ ID NO: 2747 - protein, 16 aa, synthetic construct
TTNGQDSPHKSGQNQQ

SEQ ID NO: 2748 - protein, 16 aa, synthetic construct
TDKGSGSPHSKAQNQQ

SEQ ID NO: 2749 - protein, 16 aa, synthetic construct
TIDGHDSPHKSGRNQQ

SEQ ID NO: 2750 - protein, 16 aa, synthetic construct
TINGYDSPHKSGQYQH

SEQ ID NO: 2751 - protein, 16 aa, synthetic construct
TDNGHDSPHKSRQNQQ

SEQ ID NO: 2752 - protein, 16 aa, synthetic construct
TINGHDSPHKSWVRQQ

SEQ ID NO: 2753 - protein, 16 aa, synthetic construct
TINGHESPHKSGQNQH

SEQ ID NO: 2754 - protein, 16 aa, synthetic construct
TVNGHDSPHKIGHNQQ

SEQ ID NO: 2755 - protein, 16 aa, synthetic construct
TCNGHDSPHKSGRNQQ

SEQ ID NO: 2756 - protein, 16 aa, synthetic construct
TINGNGSPHSKAQNHQ

SEQ ID NO: 2757 - protein, 16 aa, synthetic construct
NVVGHDSPHKSGQNQQ

SEQ ID NO: 2758 - protein, 16 aa, synthetic construct
TINGHDSPHKSNAWQQ

SEQ ID NO: 2759 - protein, 16 aa, synthetic construct
TDAGHDSPHKSGQNQQ

SEQ ID NO: 2760 - protein, 16 aa, synthetic construct
TEVGHDSPHKSGQNQQ

SEQ ID NO: 2761 - protein, 16 aa, synthetic construct
SELGHDSPHKSGQNQQ

SEQ ID NO: 2762 - protein, 16 aa, synthetic construct
TINGHDSPHKSGQSVP

SEQ ID NO: 2763 - protein, 16 aa, synthetic construct
TINGHESPHKSGQNIQ

SEQ ID NO: 2764 - protein, 16 aa, synthetic construct
TINGHDSPHKSVQNHL

SEQ ID NO: 2765 - protein, 16 aa, synthetic construct
TINGHDSPHKIGLDQQ

SEQ ID NO: 2766 - protein, 16 aa, synthetic construct
TSNASGSPHSKAQHQQ

SEQ ID NO: 2767 - protein, 16 aa, synthetic construct
TINGHDSPHKRGPDQQ

SEQ ID NO: 2768 - protein, 16 aa, synthetic construct
TINGMGSPHSKTQNQQ

SEQ ID NO: 2769 - protein, 16 aa, synthetic construct
TIKGHDSPHKSGESQQ

SEQ ID NO: 2770 - protein, 16 aa, synthetic construct
TINGHDSPHKHGQNHQ

SEQ ID NO: 2771 - protein, 16 aa, synthetic construct
TVNGTGSPHSKAQNQL

SEQ ID NO: 2772 - protein, 16 aa, synthetic construct
TIIGHDSPHKSGQYQH

SEQ ID NO: 2773 - protein, 16 aa, synthetic construct
TSNGHDSPHKSVQNKQ

SEQ ID NO: 2774 - protein, 16 aa, synthetic construct
IVNGQVSPHKSGQNQQ

SEQ ID NO: 2775 - protein, 16 aa, synthetic construct
TVNGHDSPHKSGQRQL

SEQ ID NO: 2776 - protein, 16 aa, synthetic construct
TVNGHDSPHKIGQNQL

SEQ ID NO: 2777 - protein, 16 aa, synthetic construct
TINGHDSPHKSGQIIV

SEQ ID NO: 2778 - protein, 16 aa, synthetic construct
IGNGHESPHKSGQNQQ

SEQ ID NO: 2779 - protein, 16 aa, synthetic construct
EVMGHDSPHKSGQNQQ

SEQ ID NO: 2780 - protein, 16 aa, synthetic construct
TINGYDSPHKSGQKQS

SEQ ID NO: 2781 - protein, 16 aa, synthetic construct
TIHGNGSPHSKAQNQE

SEQ ID NO: 2782 - protein, 16 aa, synthetic construct
YQVGHDSPHKSGQNQQ

SEQ ID NO: 2783 - protein, 16 aa, synthetic construct
TIKGDDSPHKSVQNQQ

SEQ ID NO: 2784 - protein, 16 aa, synthetic construct
TINGHDSPHKSVQSHQ

SEQ ID NO: 2785 - protein, 16 aa, synthetic construct
TINGHDSPHKSGQFVV

SEQ ID NO: 2786 - protein, 16 aa, synthetic construct
TVNGHDSPHKSRQNLQ

SEQ ID NO: 2787 - protein, 16 aa, synthetic construct
ATNGHNSPHKSGQNQE

SEQ ID NO: 2788 - protein, 16 aa, synthetic construct
AINGHDSPHKSAQNQQ

SEQ ID NO: 2789 - protein, 16 aa, synthetic construct
TEHGHDSPHKSGQNQQ

SEQ ID NO: 2790 - protein, 16 aa, synthetic construct
TIYGHDSPHKSGQSQP

SEQ ID NO: 2791 - protein, 16 aa, synthetic construct
TISGHESPHKSGQNEQ

SEQ ID NO: 2792 - protein, 16 aa, synthetic construct
AIIGHDSPHKSAQNQQ

SEQ ID NO: 2793 - protein, 16 aa, synthetic construct
AIDGHDSPHKSGQNQL

SEQ ID NO: 2794 - protein, 16 aa, synthetic construct
TIMGHDSPHKSVQNQQ

SEQ ID NO: 2795 - protein, 16 aa, synthetic construct
EVGGHDSPHKSGQNQQ

SEQ ID NO: 2796 - protein, 16 aa, synthetic construct
TINGHDSPHKSAQNLL

SEQ ID NO: 2797 - protein, 16 aa, synthetic construct
TINASGSPHSKAINQQ

SEQ ID NO: 2798 - protein, 16 aa, synthetic construct
AINGNGSPHKRGQNQQ

SEQ ID NO: 2799 - protein, 16 aa, synthetic construct
SEMGHDSPHKSGQNQQ

SEQ ID NO: 2800 - protein, 16 aa, synthetic construct
AQQGHDSPHKSGQNQQ

SEQ ID NO: 2801 - protein, 16 aa, synthetic construct
AINGHDSPHKSGQSLQ

SEQ ID NO: 2802 - protein, 16 aa, synthetic construct
TINGSGSPHSKAPNQQ

SEQ ID NO: 2803 - protein, 16 aa, synthetic construct
CGEGHDSPHKSGQNQQ

SEQ ID NO: 2804 - protein, 16 aa, synthetic construct
TVNGHDSPHKSAQNHQ

SEQ ID NO: 2805 - protein, 16 aa, synthetic construct
TVNGHDSPHKSGQTQL

SEQ ID NO: 2806 - protein, 16 aa, synthetic construct
TNNGHDSPHKSGRNRQ

SEQ ID NO: 2807 - protein, 16 aa, synthetic construct
TINGHDSPHKYGQNEQ

SEQ ID NO: 2808 - protein, 16 aa, synthetic construct
TINGNGSPHSKAPNLQ

SEQ ID NO: 2809 - protein, 16 aa, synthetic construct
SINGHDSPHKSQQNQQ

SEQ ID NO: 2810 - protein, 16 aa, synthetic construct
TIGGHDSPHKSGQNQQ

SEQ ID NO: 2811 - protein, 16 aa, synthetic construct
TINGHDSPHKSVQSKQ

SEQ ID NO: 2812 - protein, 16 aa, synthetic construct
ELVGHDSPHKSGQNQQ

SEQ ID NO: 2813 - protein, 16 aa, synthetic construct
ELMGHDSPHKSGQNQQ

SEQ ID NO: 2814 - protein, 16 aa, synthetic construct
TINGNDSPHKIGHNQQ

SEQ ID NO: 2815 - protein, 16 aa, synthetic construct
TIKGGGSPHSKAQDQQ

SEQ ID NO: 2816 - protein, 16 aa, synthetic construct
TVNGHDSPHKSGQTQQ

SEQ ID NO: 2817 - protein, 16 aa, synthetic construct
TINGQDSPHKSGQNPL

SEQ ID NO: 2818 - protein, 16 aa, synthetic construct
TVNASGSPHSKAQNHQ

SEQ ID NO: 2819 - protein, 16 aa, synthetic construct
TINGHDSPHKSGRDQK

SEQ ID NO: 2820 - protein, 16 aa, synthetic construct
TINGHDSPHKSVHNQQ

SEQ ID NO: 2821 - protein, 16 aa, synthetic construct
TINGHDSPHKSGQWKR

SEQ ID NO: 2822 - protein, 16 aa, synthetic construct
TIDGSGSPHSKAENRQ

SEQ ID NO: 2823 - protein, 16 aa, synthetic construct
NEIGHDSPHKSGQNQQ

SEQ ID NO: 2824 - protein, 16 aa, synthetic construct
AINGHDSPHKSGQSQQ

SEQ ID NO: 2825 - protein, 16 aa, synthetic construct
IINGHDSPHKSRQAQQ

SEQ ID NO: 2826 - protein, 16 aa, synthetic construct
TPNGHDSPHKSGQNQQ

SEQ ID NO: 2827 - protein, 16 aa, synthetic construct
ITNGHDSPHKSGQTQQ

SEQ ID NO: 2828 - protein, 16 aa, synthetic construct
TINGHDSPHKSVQNHQ

SEQ ID NO: 2829 - protein, 16 aa, synthetic construct
TINGHDSPHKSKQNQQ

SEQ ID NO: 2830 - protein, 16 aa, synthetic construct
TINGHDSPHKSAQNQL

SEQ ID NO: 2831 - protein, 16 aa, synthetic construct
TVNGHDSPHKSGQTQP

SEQ ID NO: 2832 - protein, 16 aa, synthetic construct
TDQGHDSPHKSGQNQQ

SEQ ID NO: 2833 - protein, 16 aa, synthetic construct
TINGHDSPHKLWINQQ

SEQ ID NO: 2834 - protein, 16 aa, synthetic construct
GINGPDSPHKSGQNQQ

SEQ ID NO: 2835 - protein, 16 aa, synthetic construct
SEIGHDSPHKSGQNQQ

SEQ ID NO: 2836 - protein, 16 aa, synthetic construct
TINGHDSPHKSVQKQL

SEQ ID NO: 2837 - protein, 16 aa, synthetic construct
TINGHPSPHWKGQNQQ

SEQ ID NO: 2838 - protein, 16 aa, synthetic construct
TVNGHDSPHKSGRNQL

SEQ ID NO: 2839 - protein, 16 aa, synthetic construct
TIKGSGSPHSKVQDQQ

SEQ ID NO: 2840 - protein, 16 aa, synthetic construct
SEKGHDSPHKSGQNQQ

SEQ ID NO: 2841 - protein, 16 aa, synthetic construct
WSAGHDSPHKSGQNQQ

SEQ ID NO: 2842 - protein, 16 aa, synthetic construct
ELAGHDSPHKSGQNQQ

SEQ ID NO: 2843 - protein, 16 aa, synthetic construct
TINGHDSPHKMGRNQQ

SEQ ID NO: 2844 - protein, 16 aa, synthetic construct
TINGHDSPHKSGISIQ

SEQ ID NO: 2845 - protein, 16 aa, synthetic construct
TSNGHDSPHKSVQNLQ

SEQ ID NO: 2846 - protein, 16 aa, synthetic construct
QTQGHDSPHKSGQNQQ

SEQ ID NO: 2847 - protein, 16 aa, synthetic construct
TINGHDSPHKMAHNQQ

SEQ ID NO: 2848 - protein, 16 aa, synthetic construct
AINGSGSPHSKAQTQQ

SEQ ID NO: 2849 - protein, 16 aa, synthetic construct
TINGHDSPHKHGQNQQ

SEQ ID NO: 2850 - protein, 16 aa, synthetic construct
GADGHDSPHKSGQNQQ

SEQ ID NO: 2851 - protein, 16 aa, synthetic construct
VGEGHDSPHKSGQNQQ

SEQ ID NO: 2852 - protein, 16 aa, synthetic construct
ANEGHDSPHKSGQNQQ

SEQ ID NO: 2853 - protein, 16 aa, synthetic construct
TEAKSGSPHSKAQNQQ

SEQ ID NO: 2854 - protein, 16 aa, synthetic construct
TINGHDSPHKSVQSQQ

SEQ ID NO: 2855 - protein, 16 aa, synthetic construct
TIPGSGSPHSKAQNLQ

SEQ ID NO: 2856 - protein, 16 aa, synthetic construct
TINGHDSPHKSGQTVC

SEQ ID NO: 2857 - protein, 16 aa, synthetic construct
ELRGHDSPHKSGQNQQ

SEQ ID NO: 2858 - protein, 16 aa, synthetic construct
CQIGHDSPHKSGQNQQ

SEQ ID NO: 2859 - protein, 16 aa, synthetic construct
GVMGHDSPHKSGQNQQ

SEQ ID NO: 2860 - protein, 16 aa, synthetic construct
ACDGHDSPHKSGQNQQ

SEQ ID NO: 2861 - protein, 16 aa, synthetic construct
TINGQDSPHKSGQYQQ

SEQ ID NO: 2862 - protein, 16 aa, synthetic construct
TINGHDSPHKSGQQIM

SEQ ID NO: 2863 - protein, 16 aa, synthetic construct
TINGHDSPHKSRQNEQ

SEQ ID NO: 2864 - protein, 16 aa, synthetic construct
ASNGHDSPHKSGLNHQ

SEQ ID NO: 2865 - protein, 16 aa, synthetic construct
TVNGHDSPHKSGQSQP

SEQ ID NO: 2866 - protein, 16 aa, synthetic construct
NELGHDSPHKSGQNQQ

SEQ ID NO: 2867 - protein, 16 aa, synthetic construct
AAEGHDSPHKSGQNQQ

SEQ ID NO: 2868 - protein, 16 aa, synthetic construct
GQNGHDSPHKSGQNQQ

SEQ ID NO: 2869 - protein, 16 aa, synthetic construct
NEFGHDSPHKSGQNQQ

SEQ ID NO: 2870 - protein, 16 aa, synthetic construct
TSIGYDSPHKSGQNQQ

SEQ ID NO: 2871 - protein, 16 aa, synthetic construct
TDNGHDSPHKSGQNLQ

SEQ ID NO: 2872 - protein, 16 aa, synthetic construct
TITGHDSPHKSRQDQQ

SEQ ID NO: 2873 - protein, 16 aa, synthetic construct
AEHGHDSPHKSGQNQQ

SEQ ID NO: 2874 - protein, 16 aa, synthetic construct
TINGDDSPHKSGQKQL

SEQ ID NO: 2875 - protein, 16 aa, synthetic construct
EILGHDSPHKSGQNQQ

SEQ ID NO: 2876 - protein, 16 aa, synthetic construct
TIHGSGSPHSKAQNQA

SEQ ID NO: 2877 - protein, 16 aa, synthetic construct
AINGDDSPHKSGHNQQ

SEQ ID NO: 2878 - protein, 16 aa, synthetic construct
TSNGHNSPHKSGQNQE

SEQ ID NO: 2879 - protein, 16 aa, synthetic construct
TINGHDSPHKSGQMIH

SEQ ID NO: 2880 - protein, 16 aa, synthetic construct
NAIGHDSPHKSGQNQQ

SEQ ID NO: 2881 - protein, 16 aa, synthetic construct
VINGHDSPHKSGRNHQ

SEQ ID NO: 2882 - protein, 16 aa, synthetic construct
TITGHDSPHKSVQNRQ

SEQ ID NO: 2883 - protein, 16 aa, synthetic construct
TINGHDSPHKSGQKMN

SEQ ID NO: 2884 - protein, 16 aa, synthetic construct
TIHGHDSPHKSGQSQQ

SEQ ID NO: 2885 - protein, 16 aa, synthetic construct
TEIGHDSPHKSGQNQQ

SEQ ID NO: 2886 - protein, 16 aa, synthetic construct
TINGHDSPHKSGQYQH

SEQ ID NO: 2887 - protein, 14 aa, synthetic construct
GSGSPHSKAQNRHT

SEQ ID NO: 2888 - protein, 14 aa, synthetic construct
GSGSPHSKVQNQQT

SEQ ID NO: 2889 - protein, 14 aa, synthetic construct
MSGSPHSKAQNQQT

SEQ ID NO: 2890 - protein, 14 aa, synthetic construct
GSGSPHSKARDQQT

SEQ ID NO: 2891 - protein, 14 aa, synthetic construct
GSGSPHSKAPNLQT

SEQ ID NO: 2892 - protein, 14 aa, synthetic construct
TSGSPHSKAQNQQT

SEQ ID NO: 2893 - protein, 14 aa, synthetic construct
GSGSPHSKAHVRQT

SEQ ID NO: 2894 - protein, 14 aa, synthetic construct
GSGSPHSKAPNQHT

SEQ ID NO: 2895 - protein, 14 aa, synthetic construct
ISGSPHSKAQNQQT

SEQ ID NO: 2896 - protein, 14 aa, synthetic construct
GSGSPHSKTQSQQT

SEQ ID NO: 2897 - skipped

SEQ ID NO: 2898 - protein, 14 aa, synthetic construct
ESGSPHSKAQNQQI

SEQ ID NO: 2899 - protein, 14 aa, synthetic construct
GSGSPHSKAQPAKT

SEQ ID NO: 2900 - protein, 14 aa, synthetic construct
SSGSPHSKAQNQQT

SEQ ID NO: 2901 - protein, 14 aa, synthetic construct
GSGSPHSKSQTQQN

SEQ ID NO: 2902 - protein, 14 aa, synthetic construct
ASGSPHSKAQNQQT

SEQ ID NO: 2903 - protein, 14 aa, synthetic construct
GSGSPHSKAQNLAT

SEQ ID NO: 2904 - protein, 14 aa, synthetic construct
GSGSPHSKSQNQLT

SEQ ID NO: 2905 - protein, 14 aa, synthetic construct
NSGSPHSKAQNQQT

SEQ ID NO: 2906 - protein, 14 aa, synthetic construct
GSGSPHSKAQGQQT

SEQ ID NO: 2907 - protein, 14 aa, synthetic construct
VSGSPHSKAQNQQT

SEQ ID NO: 2908 - protein, 14 aa, synthetic construct
GSGSPHSKALNRQS

SEQ ID NO: 2909 - protein, 14 aa, synthetic construct
LSGSPHSKAQNQQT

SEQ ID NO: 2910 - protein, 14 aa, synthetic construct
GSGSPHSKAHNQQT

SEQ ID NO: 2911 - protein, 14 aa, synthetic construct
GSGSPHSKTQNQQT

SEQ ID NO: 2912 - protein, 14 aa, synthetic construct
GSGSPHSKAQNPPT

SEQ ID NO: 2913 - protein, 14 aa, synthetic construct
GSGSPHSKAQNLQT

SEQ ID NO: 2914 - protein, 14 aa, synthetic construct
GSGSPHSKAQYQQT

SEQ ID NO: 2915 - protein, 14 aa, synthetic construct
GSGSPHSKAQDQET

SEQ ID NO: 2916 - protein, 14 aa, synthetic construct
KSGSPHSKAQNQQT

SEQ ID NO: 2917 - protein, 14 aa, synthetic construct
GSGSPHSKAQNHQT

SEQ ID NO: 2918 - protein, 14 aa, synthetic construct
GSGSPHSKAQDQQT

SEQ ID NO: 2919 - protein, 14 aa, synthetic construct
GSGSPHSKGHWQQT

SEQ ID NO: 2920 - protein, 14 aa, synthetic construct
GSGSPHSKAPNQQT

SEQ ID NO: 2921 - protein, 14 aa, synthetic construct
GSGSPHSKAQNQLI

SEQ ID NO: 2922 - protein, 14 aa, synthetic construct
GSGSPHSKRPEQQT

SEQ ID NO: 2923 - protein, 14 aa, synthetic construct
GSGSPHSKAQRTMT

SEQ ID NO: 2924 - protein, 14 aa, synthetic construct
GSGSPHSKAQNQQH

SEQ ID NO: 2925 - protein, 14 aa, synthetic construct
HSGSPHSKAQNQQT

SEQ ID NO: 2926 - protein, 14 aa, synthetic construct
GSGSPHSKALHQHT

SEQ ID NO: 2927 - protein, 14 aa, synthetic construct
GSGSPHSKAQHRIT

SEQ ID NO: 2928 - protein, 14 aa, synthetic construct
GSGSPHSKAQYIHT

SEQ ID NO: 2929 - protein, 14 aa, synthetic construct
GSGSPHSKAQKFET

SEQ ID NO: 2930 - protein, 14 aa, synthetic construct
ESGSPHSKAQNHQT

SEQ ID NO: 2931 - protein, 14 aa, synthetic construct
GSGSPHSKAQFPST

SEQ ID NO: 2932 - protein, 14 aa, synthetic construct
PSGSPHSKAQNQQT

SEQ ID NO: 2933 - protein, 14 aa, synthetic construct
GSGSPHSKAHNQQR

SEQ ID NO: 2934 - protein, 14 aa, synthetic construct
GSGSPHSKAQAIKT

SEQ ID NO: 2935 - protein, 14 aa, synthetic construct
GSGSPHSKGQNRQT

SEQ ID NO: 2936 - protein, 14 aa, synthetic construct
GSGSPHSKAQSQQT

SEQ ID NO: 2937 - protein, 14 aa, synthetic construct
ASGSPHSKAQNQLT

SEQ ID NO: 2938 - protein, 14 aa, synthetic construct
RSGSPHSKAQNQQT

SEQ ID NO: 2939 - protein, 14 aa, synthetic construct
GSGSPHSKAQYQHT

SEQ ID NO: 2940 - protein, 14 aa, synthetic construct
GSGSPHTKAQNPQS

SEQ ID NO: 2941 - protein, 14 aa, synthetic construct
GSGSPHSKGQNPPT

SEQ ID NO: 2942 - protein, 14 aa, synthetic construct
GSGSPHSKAQHQLT

SEQ ID NO: 2943 - protein, 14 aa, synthetic construct
GSGSPHSKAQSPPT

SEQ ID NO: 2944 - protein, 14 aa, synthetic construct
GSGSPHSKAQAKLT

SEQ ID NO: 2945 - protein, 14 aa, synthetic construct
GSGSPHSKTKSQQT

SEQ ID NO: 2946 - protein, 14 aa, synthetic construct
GSGSPHSKAQDRPT

SEQ ID NO: 2947 - protein, 14 aa, synthetic construct
GSGSPHSKAQSQQL

SEQ ID NO: 2948 - protein, 14 aa, synthetic construct
GSGSPHSKAQAFHT

SEQ ID NO: 2949 - protein, 14 aa, synthetic construct
GSGSPHSKAQKQQD

SEQ ID NO: 2950 - protein, 14 aa, synthetic construct
GSGSPHSKAQNAQT

SEQ ID NO: 2951 - protein, 14 aa, synthetic construct
WSGSPHSKAQNQQT

SEQ ID NO: 2952 - protein, 14 aa, synthetic construct
GSGSPHSKAHNQLT

SEQ ID NO: 2953 - protein, 14 aa, synthetic construct
GSGSPHSKAQNQQY

SEQ ID NO: 2954 - protein, 14 aa, synthetic construct
GSGSPHSKAQKLNT

SEQ ID NO: 2955 - protein, 14 aa, synthetic construct
GSGSPHSKSQNVQT

SEQ ID NO: 2956 - protein, 14 aa, synthetic construct
GSGSPHSKAQAQQT

SEQ ID NO: 2957 - protein, 14 aa, synthetic construct
GSGSPHSKAQNLQA

SEQ ID NO: 2958 - protein, 14 aa, synthetic construct
DSGSPHSKAQNQQT

SEQ ID NO: 2959 - protein, 14 aa, synthetic construct
ASGSPHSKAPNQQT

SEQ ID NO: 2960 - protein, 14 aa, synthetic construct
GSGSPHSKAQTPPT

SEQ ID NO: 2961 - protein, 14 aa, synthetic construct
GSGSPHSKAQYQHA

SEQ ID NO: 2962 - protein, 14 aa, synthetic construct
GSGSPHSKAQGQQA

SEQ ID NO: 2963 - protein, 14 aa, synthetic construct
GSGSPHNKAQNHQT

SEQ ID NO: 2964 - protein, 14 aa, synthetic construct
GSGSPHSKAQPPAT

SEQ ID NO: 2965 - protein, 14 aa, synthetic construct
GSGSPHSKAQERPT

SEQ ID NO: 2966 - protein, 14 aa, synthetic construct
GSGSPHSKAQDLQT

SEQ ID NO: 2967 - protein, 14 aa, synthetic construct
GSGSPHSKAQAMHT

SEQ ID NO: 2968 - protein, 14 aa, synthetic construct
GSGSPHSKALNQQT

SEQ ID NO: 2969 - protein, 14 aa, synthetic construct
GSGSPHSKAQHPST

SEQ ID NO: 2970 - protein, 14 aa, synthetic construct
GSGSPHSKAPGLQT

SEQ ID NO: 2971 - protein, 14 aa, synthetic construct
GSGSPHSKAQGIRT

SEQ ID NO: 2972 - protein, 14 aa, synthetic construct
GSGSPHSKAQAPAT

SEQ ID NO: 2973 - protein, 14 aa, synthetic construct
GSGSPHSKSQSQQI

SEQ ID NO: 2974 - protein, 14 aa, synthetic construct
GSGSPHSKAQIPPT

SEQ ID NO: 2975 - protein, 14 aa, synthetic construct
GSGSPHSKAQTQLT

SEQ ID NO: 2976 - protein, 14 aa, synthetic construct
GSGSPHSKAQAPST

SEQ ID NO: 2977 - protein, 14 aa, synthetic construct
GSGSPHSKGQNQQT

SEQ ID NO: 2978 - protein, 14 aa, synthetic construct
ASGSPHSKAHNQQT

SEQ ID NO: 2979 - protein, 14 aa, synthetic construct
GSGSPHSKAQNTYA

SEQ ID NO: 2980 - protein, 14 aa, synthetic construct
GSGSPHSKSQNQHI

SEQ ID NO: 2981 - protein, 14 aa, synthetic construct
GSGSPHSKAQNHLT

SEQ ID NO: 2982 - protein, 14 aa, synthetic construct
GSGSPHSKAQIGMT

SEQ ID NO: 2983 - protein, 14 aa, synthetic construct
GSGSPHSKALNKQT

SEQ ID NO: 2984 - protein, 14 aa, synthetic construct
GSGSPHSKAQLQQT

SEQ ID NO: 2985 - protein, 14 aa, synthetic construct
GSGSPHSKAQRMST

SEQ ID NO: 2986 - protein, 14 aa, synthetic construct
GSGSPHSKAQGILT

SEQ ID NO: 2987 - protein, 14 aa, synthetic construct
GSGSPHSKAQDRQT

SEQ ID NO: 2988 - protein, 14 aa, synthetic construct
GSGSPHSKARDWQT

SEQ ID NO: 2989 - protein, 14 aa, synthetic construct
GSGSPHSKAQNTHD

SEQ ID NO: 2990 - protein, 14 aa, synthetic construct
GSGSPHSKAPNLQI

SEQ ID NO: 2991 - protein, 14 aa, synthetic construct
GSGSPHSKAQERST

SEQ ID NO: 2992 - protein, 14 aa, synthetic construct
GSGSPHSKAQNYQT

SEQ ID NO: 2993 - protein, 14 aa, synthetic construct
GSGSPHSKAQRTCT

SEQ ID NO: 2994 - protein, 14 aa, synthetic construct
GSGSPHSKAQIGHT

SEQ ID NO: 2995 - protein, 14 aa, synthetic construct
GSGSPHSKAQGAIT

SEQ ID NO: 2996 - protein, 14 aa, synthetic construct
GSGSPHSKAQVPPT

SEQ ID NO: 2997 - protein, 14 aa, synthetic construct
GSGSPHSKAQVQQI

SEQ ID NO: 2998 - protein, 14 aa, synthetic construct
GSGSPHSKALMRQT

SEQ ID NO: 2999 - protein, 14 aa, synthetic construct
GSGSPHSKAQYSVT

SEQ ID NO: 3000 - protein, 14 aa, synthetic construct
GSGSPHSKVPNLQT

SEQ ID NO: 3001 - protein, 14 aa, synthetic construct
GSGSPHSKAQSQQI

SEQ ID NO: 3002 - protein, 14 aa, synthetic construct
GSGSPHSKAQAITT

SEQ ID NO: 3003 - protein, 14 aa, synthetic construct
GSGSPHSKAQKTLT

SEQ ID NO: 3004 - protein, 14 aa, synthetic construct
GSGSPHSKAQNQWT

SEQ ID NO: 3005 - protein, 14 aa, synthetic construct
GSGSPHSKAQLHHT

SEQ ID NO: 3006 - protein, 14 aa, synthetic construct
GSGSPHSKAQNIII

SEQ ID NO: 3007 - protein, 14 aa, synthetic construct
GSGSPHSKAQGHHT

SEQ ID NO: 3008 - protein, 14 aa, synthetic construct
GSGSPHSKAQSKVT

SEQ ID NO: 3009 - protein, 14 aa, synthetic construct
GSGSPHSKAQLPST

SEQ ID NO: 3010 - protein, 14 aa, synthetic construct
GSGSPHSKAIGKQT

SEQ ID NO: 3011 - protein, 14 aa, synthetic construct
GSGSPHSKAQAIHT

SEQ ID NO: 3012 - protein, 14 aa, synthetic construct
GSGSPHSKAQHGLT

SEQ ID NO: 3013 - protein, 14 aa, synthetic construct
GSGSPHSKAQFMCT

SEQ ID NO: 3014 - protein, 14 aa, synthetic construct
VSGSPHSKAQGQQT

SEQ ID NO: 3015 - protein, 14 aa, synthetic construct
GSGSPHSKAQHLQT

SEQ ID NO: 3016 - protein, 14 aa, synthetic construct
GSGSPHSKTQNHQN

SEQ ID NO: 3017 - protein, 14 aa, synthetic construct
GSGSPHSKAQPART

SEQ ID NO: 3018 - protein, 14 aa, synthetic construct
GSGSPHSKAQSLQT

SEQ ID NO: 3019 - protein, 14 aa, synthetic construct
GSGSPHSKSQSQLT

SEQ ID NO: 3020 - protein, 14 aa, synthetic construct
GSGSPHSKAQDRQS

SEQ ID NO: 3021 - protein, 14 aa, synthetic construct
GSGSPHSKAQMPST

SEQ ID NO: 3022 - protein, 14 aa, synthetic construct
GSGSPHSKAQGSLT

SEQ ID NO: 3023 - protein, 14 aa, synthetic construct
GSGSPHSKSQNQQT

SEQ ID NO: 3024 - protein, 14 aa, synthetic construct
GSGSPHSKAQVPAT

SEQ ID NO: 3025 - protein, 14 aa, synthetic construct
GSGSPHSKAQDKQT

SEQ ID NO: 3026 - protein, 14 aa, synthetic construct
GSGSPHSKAHYQQT

SEQ ID NO: 3027 - protein, 14 aa, synthetic construct
GSGSPHSKAQVPST

SEQ ID NO: 3028 - protein, 14 aa, synthetic construct
GSGSPHSKARGEQT

SEQ ID NO: 3029 - protein, 14 aa, synthetic construct
GSGSPHSKAPGQQT

SEQ ID NO: 3030 - protein, 14 aa, synthetic construct
GSGSPHSKAQSLQI

SEQ ID NO: 3031 - protein, 14 aa, synthetic construct
GSGSPHSKRLEQQT

SEQ ID NO: 3032 - protein, 14 aa, synthetic construct
GSGSPHSKAQNQST

SEQ ID NO: 3033 - protein, 14 aa, synthetic construct
GSGSPHSKAQKVIT

SEQ ID NO: 3034 - protein, 14 aa, synthetic construct
GSGSPHSKAQNNDQ

SEQ ID NO: 3035 - protein, 14 aa, synthetic construct
GSGSPHSKAQSVHT

SEQ ID NO: 3036 - protein, 14 aa, synthetic construct
GSGSPHSKAQPLGT

SEQ ID NO: 3037 - protein, 14 aa, synthetic construct
GSGSPHSKAHNQET

SEQ ID NO: 3038 - protein, 14 aa, synthetic construct
GSGSPHSKAQNLQI

SEQ ID NO: 3039 - protein, 14 aa, synthetic construct
GSGSPHSKAQIQQT

SEQ ID NO: 3040 - protein, 14 aa, synthetic construct
GSGSPHSKAQVRNT

SEQ ID NO: 3041 - protein, 14 aa, synthetic construct
GSGSPHSKAPSNQT

SEQ ID NO: 3042 - protein, 14 aa, synthetic construct
GSGSPHSKAQVGHT

SEQ ID NO: 3043 - protein, 14 aa, synthetic construct
GSGSPHSKAQRDIT

SEQ ID NO: 3044 - protein, 14 aa, synthetic construct
GSGSPHSKAQMPNT

SEQ ID NO: 3045 - protein, 14 aa, synthetic construct
GSGSPHSKARGLQT

SEQ ID NO: 3046 - protein, 14 aa, synthetic construct
GSGSPHSKLQKQQT

SEQ ID NO: 3047 - protein, 14 aa, synthetic construct
GSGSPHSKAPSLQT

SEQ ID NO: 3048 - protein, 14 aa, synthetic construct
GSGSPHSKAQRDQT

SEQ ID NO: 3049 - protein, 14 aa, synthetic construct
GSGSPHSKNRDQQT

SEQ ID NO: 3050 - protein, 14 aa, synthetic construct
GSGSPHSKAQAKGT

SEQ ID NO: 3051 - protein, 14 aa, synthetic construct
GSGSPHSKAQSAHT

SEQ ID NO: 3052 - protein, 14 aa, synthetic construct
GSGSPHSKSQNHQT

SEQ ID NO: 3053 - protein, 14 aa, synthetic construct
RSGSPHSKAQDQQT

SEQ ID NO: 3054 - protein, 14 aa, synthetic construct
GSGSPHSKAQSTMT

SEQ ID NO: 3055 - protein, 14 aa, synthetic construct
GSGSPHSKAQREMT

SEQ ID NO: 3056 - protein, 14 aa, synthetic construct
GSGSPHSKAQYRAT

SEQ ID NO: 3057 - protein, 14 aa, synthetic construct
GSGSPHSKNQWQQT

SEQ ID NO: 3058 - protein, 14 aa, synthetic construct
GSGSPHSKAQRMNT

SEQ ID NO: 3059 - protein, 14 aa, synthetic construct
GSGSPHAKAQNHQT

SEQ ID NO: 3060 - protein, 14 aa, synthetic construct
GSGSPHSKAGDSQT

SEQ ID NO: 3061 - protein, 14 aa, synthetic construct
GSGSPHSKLKSQQT

SEQ ID NO: 3062 - protein, 14 aa, synthetic construct
GSGSPHSKAQKIST

SEQ ID NO: 3063 - protein, 14 aa, synthetic construct
GSGSPHSKAPSMQT

SEQ ID NO: 3064 - protein, 14 aa, synthetic construct
GSGSPHSKASPRQT

SEQ ID NO: 3065 - protein, 14 aa, synthetic construct
GSGSPHSKRMEQQT

SEQ ID NO: 3066 - protein, 14 aa, synthetic construct
GSGSPHSKAQYQNT

SEQ ID NO: 3067 - protein, 14 aa, synthetic construct
RSGSPHSKAQNQQI

SEQ ID NO: 3068 - protein, 14 aa, synthetic construct
GSGSPHTKAQNPPT

SEQ ID NO: 3069 - protein, 14 aa, synthetic construct
GSGSPHTKAQNQQT

SEQ ID NO: 3070 - protein, 14 aa, synthetic construct
ASGSPHSKAQHQQT

SEQ ID NO: 3071 - protein, 14 aa, synthetic construct
ASGSPHSKAINQQT

SEQ ID NO: 3072 - protein, 14 aa, synthetic construct
GSGSPHSKAPNQQH

SEQ ID NO: 3073 - protein, 14 aa, synthetic construct
ASGSPHSKAQNHQT

SEQ ID NO: 3074 - protein, 14 aa, synthetic construct
GSGSPHSKAENRQT

SEQ ID NO: 3075 - protein, 14 aa, synthetic construct
GSGSPHSKVQDQQT

SEQ ID NO: 3076 - protein, 14 aa, synthetic construct
GSGSPHSKAQTQQA

SEQ ID NO: 3077 - protein, 14 aa, synthetic construct
GSGSPHSKAQNQAT

SEQ ID NO: 3078 - protein, 14 aa, synthetic construct
GHDSPHKSGQIRQT

SEQ ID NO: 3079 - protein, 14 aa, synthetic construct
GHDSPHKIGQNQHA

SEQ ID NO: 3080 - protein, 14 aa, synthetic construct
GYDSPHKSGQKQQT

SEQ ID NO: 3081 - protein, 14 aa, synthetic construct
GHDSPHKSGQNQQT

SEQ ID NO: 3082 - protein, 14 aa, synthetic construct
GHDSPHKSGQSVQT

SEQ ID NO: 3083 - protein, 14 aa, synthetic construct
GHESPHKSGRSQQT

SEQ ID NO: 3084 - protein, 14 aa, synthetic construct
GHDSPHKSGQNKLE

SEQ ID NO: 3085 - protein, 14 aa, synthetic construct
GHDSPHKTGQNQQK

SEQ ID NO: 3086 - protein, 14 aa, synthetic construct
GRGSPHKRGQNQQT

SEQ ID NO: 3087 - protein, 14 aa, synthetic construct
GHDNPHKSGQNQQT

SEQ ID NO: 3088 - protein, 14 aa, synthetic construct
GQDSPHKSGQHQQA

SEQ ID NO: 3089 - protein, 14 aa, synthetic construct
GHDSPHKSGQIQHT

SEQ ID NO: 3090 - protein, 14 aa, synthetic construct
GHDSPHKSGPRQQT

SEQ ID NO: 3091 - protein, 14 aa, synthetic construct
GHDSPHKSGHTQQT

SEQ ID NO: 3092 - protein, 14 aa, synthetic construct
GHDSPHKSGQRQHT

SEQ ID NO: 3093 - protein, 14 aa, synthetic construct
GHDSPHKSAQSQQT

SEQ ID NO: 3094 - protein, 14 aa, synthetic construct
GHESPHKSGQNQQS

SEQ ID NO: 3095 - protein, 14 aa, synthetic construct
GHDSPHKSLQNQQT

SEQ ID NO: 3096 - protein, 14 aa, synthetic construct
GHDSPHKSGRNQET

SEQ ID NO: 3097 - protein, 14 aa, synthetic construct
GHDSPHKSGQTQLT

SEQ ID NO: 3098 - protein, 14 aa, synthetic construct
GHDSPHKSEKNQQT

SEQ ID NO: 3099 - protein, 14 aa, synthetic construct
GRDSPHKSGQDQQT

SEQ ID NO: 3100 - protein, 14 aa, synthetic construct
GHDSPHKTGHNQQT

SEQ ID NO: 3101 - protein, 14 aa, synthetic construct
AHDSPHKSGQNQLT

SEQ ID NO: 3102 - protein, 14 aa, synthetic construct
GYDSPHKSGQTQQT

SEQ ID NO: 3103 - protein, 14 aa, synthetic construct
GHESPHKSGQTQQI

SEQ ID NO: 3104 - protein, 14 aa, synthetic construct
GHDSPHKSGQSKQA

SEQ ID NO: 3105 - protein, 14 aa, synthetic construct
GHESPHKSGQNQQT

SEQ ID NO: 3106 - protein, 14 aa, synthetic construct
GHDSPHKTGQNQPP

SEQ ID NO: 3107 - protein, 14 aa, synthetic construct
GHDSPHKSGQSPQT

SEQ ID NO: 3108 - protein, 14 aa, synthetic construct
GNDSPHKSVQNQQT

SEQ ID NO: 3109 - protein, 14 aa, synthetic construct
GHDSPHKSAQNYQT

SEQ ID NO: 3110 - protein, 14 aa, synthetic construct
AHDSPHKIGQNHQT

SEQ ID NO: 3111 - protein, 14 aa, synthetic construct
GHESPHKSAQNRQT

SEQ ID NO: 3112 - protein, 14 aa, synthetic construct
GHDSPHKSGQNQQG

SEQ ID NO: 3113 - protein, 14 aa, synthetic construct
GQDSPHKIGQNQQT

SEQ ID NO: 3114 - protein, 14 aa, synthetic construct
GHDSPHKSGQNHLT

SEQ ID NO: 3115 - protein, 14 aa, synthetic construct
GHDSPHKSGQYQHT

SEQ ID NO: 3116 - protein, 14 aa, synthetic construct
GNDSPHKSVQNHQT

SEQ ID NO: 3117 - protein, 14 aa, synthetic construct
GHDSPHKSGQNQWT

SEQ ID NO: 3118 - protein, 14 aa, synthetic construct
GHDSPHKSVQNQHT

SEQ ID NO: 3119 - protein, 14 aa, synthetic construct
GHDSPHKSGQNQHA

SEQ ID NO: 3120 - protein, 14 aa, synthetic construct
GHDSPHKSGQTRQT

SEQ ID NO: 3121 - protein, 14 aa, synthetic construct
GHDSPHKSGQNLHT

SEQ ID NO: 3122 - protein, 14 aa, synthetic construct
GHDSPHKSGLNQQT

SEQ ID NO: 3123 - protein, 14 aa, synthetic construct
GHDSPHKSAQNQET

SEQ ID NO: 3124 - protein, 14 aa, synthetic construct
GHDSPHKSGQHLQT

SEQ ID NO: 3125 - protein, 14 aa, synthetic construct
GHDSPHKSRLNQPT

SEQ ID NO: 3126 - protein, 14 aa, synthetic construct
GHDSPHKSGQKQQT

SEQ ID NO: 3127 - protein, 14 aa, synthetic construct
GQDSPHKSGQNQDT

SEQ ID NO: 3128 - protein, 14 aa, synthetic construct
GHDSPHKSGRNQQT

SEQ ID NO: 3129 - protein, 14 aa, synthetic construct
GHDSPHKSGQNLLT

SEQ ID NO: 3130 - protein, 14 aa, synthetic construct
GHDSPHKSGQLVIT

SEQ ID NO: 3131 - protein, 14 aa, synthetic construct
GHDSPHKSRQSQQT

SEQ ID NO: 3132 - protein, 14 aa, synthetic construct
GHDSPHKSGRTQET

SEQ ID NO: 3133 - protein, 14 aa, synthetic construct
GHDSPHKSVQTHQT

SEQ ID NO: 3134 - protein, 14 aa, synthetic construct
GHDSPHKSGQNQPA

SEQ ID NO: 3135 - protein, 14 aa, synthetic construct
KHDSPHKSGQNQQT

SEQ ID NO: 3136 - protein, 14 aa, synthetic construct
GHDSPHKSGQTQQT

SEQ ID NO: 3137 - protein, 14 aa, synthetic construct
GPDSPHKIGQNQQS

SEQ ID NO: 3138 - protein, 14 aa, synthetic construct
GHDSPHKSVQNQQT

SEQ ID NO: 3139 - protein, 14 aa, synthetic construct
GHDSPHKSRQDQHT

SEQ ID NO: 3140 - protein, 14 aa, synthetic construct
GPDSPHKSGQKQQT

SEQ ID NO: 3141 - protein, 14 aa, synthetic construct
GHDSPHKSRQSQHT

SEQ ID NO: 3142 - protein, 14 aa, synthetic construct
GHDSPHKSVQNQLT

SEQ ID NO: 3143 - protein, 14 aa, synthetic construct
AHDSPHKSGQNQQT

SEQ ID NO: 3144 - protein, 14 aa, synthetic construct
GQDSPHKSGQNQQS

SEQ ID NO: 3145 - protein, 14 aa, synthetic construct
GHDSPHKSGRNQQI

SEQ ID NO: 3146 - protein, 14 aa, synthetic construct
GYDSPHKSGQYQHT

SEQ ID NO: 3147 - protein, 14 aa, synthetic construct
GHDSPHKSRQNQQT

SEQ ID NO: 3148 - protein, 14 aa, synthetic construct
GHDSPHKSWVRQQT

SEQ ID NO: 3149 - protein, 14 aa, synthetic construct
GHESPHKSGQNQHS

SEQ ID NO: 3150 - protein, 14 aa, synthetic construct
GHDSPHKIGHNQQT

SEQ ID NO: 3151 - protein, 14 aa, synthetic construct
WHDSPHKSGQNQQT

SEQ ID NO: 3152 - protein, 14 aa, synthetic construct
RHDSPHKSGQNQQT

SEQ ID NO: 3153 - protein, 14 aa, synthetic construct
GHDSPHKSNAWQQT

SEQ ID NO: 3154 - protein, 14 aa, synthetic construct
GHDSPHKSGQSVPT

SEQ ID NO: 3155 - protein, 14 aa, synthetic construct
GHESPHKSGQNIQP

SEQ ID NO: 3156 - protein, 14 aa, synthetic construct
GHDSPHKSVQNHLN

SEQ ID NO: 3157 - protein, 14 aa, synthetic construct
GHDSPHKIGLDQQT

SEQ ID NO: 3158 - protein, 14 aa, synthetic construct
GHDSPHKRGPDQQS

SEQ ID NO: 3159 - protein, 14 aa, synthetic construct
GHDSPHKSGESQQT

SEQ ID NO: 3160 - protein, 14 aa, synthetic construct
GHDSPHKHGQNHQT

SEQ ID NO: 3161 - protein, 14 aa, synthetic construct
LHDSPHKSGQNQQT

SEQ ID NO: 3162 - protein, 14 aa, synthetic construct
GHDSPHKSVQNKQT

SEQ ID NO: 3163 - protein, 14 aa, synthetic construct
GQVSPHKSGQNQQT

SEQ ID NO: 3164 - protein, 14 aa, synthetic construct
GHDSPHKSGQRQLT

SEQ ID NO: 3165 - protein, 14 aa, synthetic construct
GHDSPHKIGQNQLT

SEQ ID NO: 3166 - protein, 14 aa, synthetic construct
GHDSPHKSGQIIVT

SEQ ID NO: 3167 - protein, 14 aa, synthetic construct
IHDSPHKSGQNQQT

SEQ ID NO: 3168 - protein, 14 aa, synthetic construct
GYDSPHKSGQKQST

SEQ ID NO: 3169 - protein, 14 aa, synthetic construct
MHDSPHKSGQNQQT

SEQ ID NO: 3170 - protein, 14 aa, synthetic construct
GDDSPHKSVQNQQT

SEQ ID NO: 3171 - protein, 14 aa, synthetic construct
GHDSPHKSVQSHQT

SEQ ID NO: 3172 - protein, 14 aa, synthetic construct
GHDSPHKSGQFVVT

SEQ ID NO: 3173 - protein, 14 aa, synthetic construct
GHDSPHKSRQNLQT

SEQ ID NO: 3174 - protein, 14 aa, synthetic construct
GHNSPHKSGQNQET

SEQ ID NO: 3175 - protein, 14 aa, synthetic construct
GHDSPHKSAQNQQI

SEQ ID NO: 3176 - protein, 14 aa, synthetic construct
NHDSPHKSGQNQQT

SEQ ID NO: 3177 - protein, 14 aa, synthetic construct
GHDSPHKSGQSQPT

SEQ ID NO: 3178 - protein, 14 aa, synthetic construct
GHESPHKSGQNEQT

SEQ ID NO: 3179 - protein, 14 aa, synthetic construct
GHDSPHKSAQNQQT

SEQ ID NO: 3180 - protein, 14 aa, synthetic construct
GHDSPHKSGQNQLT

SEQ ID NO: 3181 - protein, 14 aa, synthetic construct
GHDSPHKSAQNLLT

SEQ ID NO: 3182 - protein, 14 aa, synthetic construct
THDSPHKSGQNQQT

SEQ ID NO: 3183 - protein, 14 aa, synthetic construct
GNGSPHKRGQNQQT

SEQ ID NO: 3184 - protein, 14 aa, synthetic construct
GHDSPHKSGQSLQT

SEQ ID NO: 3185 - protein, 14 aa, synthetic construct
GHDSPHKSAQNHQT

SEQ ID NO: 3186 - protein, 14 aa, synthetic construct
GHDSPHKSGRNRQT

SEQ ID NO: 3187 - protein, 14 aa, synthetic construct
EHDSPHKSGQNQQT

SEQ ID NO: 3188 - protein, 14 aa, synthetic construct
GHDSPHKYGQNEQT

SEQ ID NO: 3189 - protein, 14 aa, synthetic construct
RHDSPHKSGHNQQT

SEQ ID NO: 3190 - protein, 14 aa, synthetic construct
GHDSPHKSQQNQQT

SEQ ID NO: 3191 - protein, 14 aa, synthetic construct
GHDSPHKSGQNQQI

SEQ ID NO: 3192 - protein, 14 aa, synthetic construct
QHDSPHKSGQNQQT

SEQ ID NO: 3193 - protein, 14 aa, synthetic construct
RHDSPHKIVQNQQT

SEQ ID NO: 3194 - protein, 14 aa, synthetic construct
YHDSPHKSGQNQQT

SEQ ID NO: 3195 - protein, 14 aa, synthetic construct
GHDSPHKSVQSKQT

SEQ ID NO: 3196 - protein, 14 aa, synthetic construct
GNDSPHKIGHNQQT

SEQ ID NO: 3197 - protein, 14 aa, synthetic construct
HHDSPHKSGQNQQT

SEQ ID NO: 3198 - protein, 14 aa, synthetic construct
GHDSPHKSGQTQQI

SEQ ID NO: 3199 - protein, 14 aa, synthetic construct
GQDSPHKSGQNPLT

SEQ ID NO: 3200 - protein, 14 aa, synthetic construct
GHDSPHKSGRDQKT

SEQ ID NO: 3201 - protein, 14 aa, synthetic construct
GHDSPHKSVHNQQN

SEQ ID NO: 3202 - protein, 14 aa, synthetic construct
GHDSPHKSGQWKRT

SEQ ID NO: 3203 - protein, 14 aa, synthetic construct
GHDSPHKSGQSQQI

SEQ ID NO: 3204 - protein, 14 aa, synthetic construct
GHDSPHKSRQAQQT

SEQ ID NO: 3205 - protein, 14 aa, synthetic construct
GHDSPHKSVQNHQI

SEQ ID NO: 3206 - protein, 14 aa, synthetic construct
GHDSPHKSKQNQQA

SEQ ID NO: 3207 - protein, 14 aa, synthetic construct
GHDSPHKSAQNQLN

SEQ ID NO: 3208 - protein, 14 aa, synthetic construct
GHDSPHKSGQTQPT

SEQ ID NO: 3209 - protein, 14 aa, synthetic construct
FHDSPHKSGQNQQT

SEQ ID NO: 3210 - protein, 14 aa, synthetic construct
GHDSPHKLWINQQT

SEQ ID NO: 3211 - protein, 14 aa, synthetic construct
GPDSPHKSGQNQQT

SEQ ID NO: 3212 - protein, 14 aa, synthetic construct
GHDSPHKSVQKQLT

SEQ ID NO: 3213 - protein, 14 aa, synthetic construct
GHDSPHKSGRNQLA

SEQ ID NO: 3214 - protein, 14 aa, synthetic construct
VHDSPHKSGQNQQS

SEQ ID NO: 3215 - protein, 14 aa, synthetic construct
GHDSPHKMGRNQQS

SEQ ID NO: 3216 - protein, 14 aa, synthetic construct
GHDSPHKSGISIQT

SEQ ID NO: 3217 - protein, 14 aa, synthetic construct
VHDSPHKSGQNQQT

SEQ ID NO: 3218 - protein, 14 aa, synthetic construct
GHDSPHKSVQNLQT

SEQ ID NO: 3219 - protein, 14 aa, synthetic construct
GHDSPHKMAHNQQT

SEQ ID NO: 3220 - protein, 14 aa, synthetic construct
GHDSPHKHGQNQQN

SEQ ID NO: 3221 - protein, 14 aa, synthetic construct
GHDSPHKSVQSQQS

SEQ ID NO: 3222 - protein, 14 aa, synthetic construct
GHDSPHKSGQTVCT

SEQ ID NO: 3223 - protein, 14 aa, synthetic construct
GQDSPHKSGQYQQI

SEQ ID NO: 3224 - protein, 14 aa, synthetic construct
GHDSPHKSGQQIMT

SEQ ID NO: 3225 - protein, 14 aa, synthetic construct
GHDSPHKSRQNEQS

SEQ ID NO: 3226 - protein, 14 aa, synthetic construct
GHDSPHKSGLNHQT

SEQ ID NO: 3227 - protein, 14 aa, synthetic construct
GYDSPHKSGQNQQT

SEQ ID NO: 3228 - protein, 14 aa, synthetic construct
GHDSPHKSGQNLQT

SEQ ID NO: 3229 - protein, 14 aa, synthetic construct
GHDSPHKSRQDQQT

SEQ ID NO: 3230 - protein, 14 aa, synthetic construct
GDDSPHKSGQKQLT

SEQ ID NO: 3231 - protein, 14 aa, synthetic construct
GDDSPHKSGHNQQT

SEQ ID NO: 3232 - protein, 14 aa, synthetic construct
GHDSPHKSGQMIHT

SEQ ID NO: 3233 - protein, 14 aa, synthetic construct
GHDSPHKSGRNHQS

SEQ ID NO: 3234 - protein, 14 aa, synthetic construct
GHDSPHKSVQNRQT

SEQ ID NO: 3235 - protein, 14 aa, synthetic construct
GHDSPHKSGQKMNT

SEQ ID NO: 3236 - protein, 14 aa, synthetic construct
GHDSPHKSGQSQQN

SEQ ID NO: 3237 - protein, 14 aa, synthetic construct
GHDSPHKSGQYQHA

SEQ ID NO: 3238 - skipped

SEQ ID NO: 3239 - protein, 18 aa, synthetic construct
KTIIGSGSPHSKAQNRHT

SEQ ID NO: 3240 - protein, 18 aa, synthetic construct
KTFPGSGSPHSKVQNQQT

SEQ ID NO: 3241 - protein, 18 aa, synthetic construct
KTEKMSGSPHSKAQNQQT

SEQ ID NO: 3242 - protein, 18 aa, synthetic construct
KTVNGSGSPHSKARDQQT

SEQ ID NO: 3243 - protein, 18 aa, synthetic construct
KTFNGSGSPHSKAPNLQT

SEQ ID NO: 3244 - protein, 18 aa, synthetic construct
KTEKTSGSPHSKAQNQQT

SEQ ID NO: 3245 - protein, 18 aa, synthetic construct
KTINGSGSPHSKAHVRQT

SEQ ID NO: 3246 - protein, 18 aa, synthetic construct
KTVNGSGSPHSKAPNQHT

SEQ ID NO: 3247 - protein, 18 aa, synthetic construct
KTEKISGSPHSKAQNQQT

SEQ ID NO: 3248 - protein, 18 aa, synthetic construct
KTVNGSGSPHSKTQSQQT

SEQ ID NO: 3249 - protein, 18 aa, synthetic construct
TTINGSGSPHSKAQNQQT

SEQ ID NO: 3250 - protein, 18 aa, synthetic construct
KSINESGSPHSKAQNQQI

SEQ ID NO: 3251 - protein, 18 aa, synthetic construct
KTERTSGSPHSKAQNQQT

SEQ ID NO: 3252 - protein, 18 aa, synthetic construct
KTINGSGSPHSKAQPAKT

SEQ ID NO: 3253 - protein, 18 aa, synthetic construct
KTEKSSGSPHSKAQNQQT

SEQ ID NO: 3254 - protein, 18 aa, synthetic construct
KTEKGSGSPHSKAQNQQT

SEQ ID NO: 3255 - protein, 18 aa, synthetic construct
KTINGSGSPHSKSQTQQN

SEQ ID NO: 3256 - protein, 18 aa, synthetic construct
KTERISGSPHSKAQNQQT

SEQ ID NO: 3257 - protein, 18 aa, synthetic construct
KTERASGSPHSKAQNQQT

SEQ ID NO: 3258 - protein, 18 aa, synthetic construct
KELHGSGSPHSKAQNQQT

SEQ ID NO: 3259 - protein, 18 aa, synthetic construct
KAINGSGSPHSKAQNLAT

SEQ ID NO: 3260 - protein, 18 aa, synthetic construct
KTVNGSGSPHSKSQNQLT

SEQ ID NO: 3261 - protein, 18 aa, synthetic construct
KTERNSGSPHSKAQNQQT

SEQ ID NO: 3262 - protein, 18 aa, synthetic construct
KTFNGSGSPHSKAQGQQT

SEQ ID NO: 3263 - protein, 18 aa, synthetic construct
KTERVSGSPHSKAQNQQT

SEQ ID NO: 3264 - protein, 18 aa, synthetic construct
KTINGSGSPHSKALNRQS

SEQ ID NO: 3265 - protein, 18 aa, synthetic construct
KTERLSGSPHSKAQNQQT

SEQ ID NO: 3266 - protein, 18 aa, synthetic construct
KTDNGSGSPHSKAHNQQT

SEQ ID NO: 3267 - protein, 18 aa, synthetic construct
KTFHGSGSPHSKTQNQQT

SEQ ID NO: 3268 - protein, 18 aa, synthetic construct
KTSNGSGSPHSKAQNPPT

SEQ ID NO: 3269 - protein, 18 aa, synthetic construct
ETINGSGSPHSKAQNLQT

SEQ ID NO: 3270 - protein, 18 aa, synthetic construct
NTINGSGSPHSKAQNQQT

SEQ ID NO: 3271 - protein, 18 aa, synthetic construct
KTENMSGSPHSKAQNQQT

SEQ ID NO: 3272 - protein, 18 aa, synthetic construct
KTENVSGSPHSKAQNQQT

SEQ ID NO: 3273 - protein, 18 aa, synthetic construct
KTSSGSGSPHSKAQYQQT

SEQ ID NO: 3274 - protein, 18 aa, synthetic construct
KTEKVSGSPHSKAQNQQT

SEQ ID NO: 3275 - protein, 18 aa, synthetic construct
KAINGSGSPHSKAQDQET

SEQ ID NO: 3276 - protein, 18 aa, synthetic construct
KTCNKSGSPHSKAQNQQT

SEQ ID NO: 3277 - protein, 18 aa, synthetic construct
KTEHLSGSPHSKAQNQQT

SEQ ID NO: 3278 - protein, 18 aa, synthetic construct
KAEMGSGSPHSKAQNQQT

SEQ ID NO: 3279 - protein, 18 aa, synthetic construct
KATNGSGSPHSKAQNHQT

SEQ ID NO: 3280 - protein, 18 aa, synthetic construct
KAIKGSGSPHSKAQDQQT

SEQ ID NO: 3281 - protein, 18 aa, synthetic construct
KTINGSGSPHSKGHWQQT

SEQ ID NO: 3282 - protein, 18 aa, synthetic construct
KTDKTSGSPHSKAQNQQT

SEQ ID NO: 3283 - protein, 18 aa, synthetic construct
KTFKGSGSPHSKAPNQQT

SEQ ID NO: 3284 - protein, 18 aa, synthetic construct
KTVNGSGSPHSKAQNQLI

SEQ ID NO: 3285 - protein, 18 aa, synthetic construct
KTINGSGSPHSKRPEQQT

SEQ ID NO: 3286 - protein, 18 aa, synthetic construct
KTINGSGSPHSKAQRTMT

SEQ ID NO: 3287 - protein, 18 aa, synthetic construct
KTEKASGSPHSKAQNQQT

SEQ ID NO: 3288 - protein, 18 aa, synthetic construct
KSDQGSGSPHSKAQNQQT

SEQ ID NO: 3289 - protein, 18 aa, synthetic construct
KTEITSGSPHSKAQNQQT

SEQ ID NO: 3290 - protein, 18 aa, synthetic construct
KTDKSSGSPHSKAQNQQT

SEQ ID NO: 3291 - protein, 18 aa, synthetic construct
KTIDGSGSPHSKAQNQQH

SEQ ID NO: 3292 - protein, 18 aa, synthetic construct
KNTNGSGSPHSKAQNQQT

SEQ ID NO: 3293 - protein, 18 aa, synthetic construct
KTETHSGSPHSKAQNQQT

SEQ ID NO: 3294 - protein, 18 aa, synthetic construct
KTINGSGSPHSKALHQHT

SEQ ID NO: 3295 - protein, 18 aa, synthetic construct
KTINGSGSPHSKAQHRIT

SEQ ID NO: 3296 - protein, 18 aa, synthetic construct
KTINGSGSPHSKAQYIHT

SEQ ID NO: 3297 - protein, 18 aa, synthetic construct
KTENISGSPHSKAQNQQT

SEQ ID NO: 3298 - protein, 18 aa, synthetic construct
KTINGSGSPHSKAQKFET

SEQ ID NO: 3299 - protein, 18 aa, synthetic construct
KTSNESGSPHSKAQNHQT

SEQ ID NO: 3300 - protein, 18 aa, synthetic construct
KTINGSGSPHSKAQFPST

SEQ ID NO: 3301 - protein, 18 aa, synthetic construct
KTERPSGSPHSKAQNQQT

SEQ ID NO: 3302 - protein, 18 aa, synthetic construct
KTERMSGSPHSKAQNQQT

SEQ ID NO: 3303 - protein, 18 aa, synthetic construct
KTERSSGSPHSKAQNQQT

SEQ ID NO: 3304 - protein, 18 aa, synthetic construct
KTELHSGSPHSKAQNQQT

SEQ ID NO: 3305 - protein, 18 aa, synthetic construct
KTELTSGSPHSKAQNQQT

SEQ ID NO: 3306 - protein, 18 aa, synthetic construct
KTINGSGSPHSKAHNQQR

SEQ ID NO: 3307 - protein, 18 aa, synthetic construct
KTINGSGSPHSKAQAIKT

SEQ ID NO: 3308 - protein, 18 aa, synthetic construct
KTENTSGSPHSKAQNQQT

SEQ ID NO: 3309 - protein, 18 aa, synthetic construct
KTIDGSGSPHSKGQNRQT

SEQ ID NO: 3310 - protein, 18 aa, synthetic construct
KNINGSGSPHSKAQSQQT

SEQ ID NO: 3311 - protein, 18 aa, synthetic construct
KTSNASGSPHSKAQNQLT

SEQ ID NO: 3312 - protein, 18 aa, synthetic construct
KTEARSGSPHSKAQNQQT

SEQ ID NO: 3313 - protein, 18 aa, synthetic construct
KTEKNSGSPHSKAQNQQT

SEQ ID NO: 3314 - protein, 18 aa, synthetic construct
KTANGSGSPHSKAQYQQT

SEQ ID NO: 3315 - protein, 18 aa, synthetic construct
KTVNGSGSPHSKAQYQHT

SEQ ID NO: 3316 - protein, 18 aa, synthetic construct
KTINGSGSPHTKAQNPQS

SEQ ID NO: 3317 - protein, 18 aa, synthetic construct
KTINGSGSPHSKGQNPPT

SEQ ID NO: 3318 - protein, 18 aa, synthetic construct
KTIIGSGSPHSKAQHQLT

SEQ ID NO: 3319 - protein, 18 aa, synthetic construct
KTINGSGSPHSKAQSPPT

SEQ ID NO: 3320 - protein, 18 aa, synthetic construct
NTIYGSGSPHSKAQNQQT

SEQ ID NO: 3321 - protein, 18 aa, synthetic construct
KTINGSGSPHSKAQAKLT

SEQ ID NO: 3322 - protein, 18 aa, synthetic construct
KTDKNSGSPHSKAQNQQT

SEQ ID NO: 3323 - protein, 18 aa, synthetic construct
KTINGSGSPHSKTKSQQT

SEQ ID NO: 3324 - protein, 18 aa, synthetic construct
KTINGSGSPHSKAQDRPT

SEQ ID NO: 3325 - protein, 18 aa, synthetic construct
KTINGSGSPHSKAQSQQL

SEQ ID NO: 3326 - protein, 18 aa, synthetic construct
KTENLSGSPHSKAQNQQT

SEQ ID NO: 3327 - protein, 18 aa, synthetic construct
KTINGSGSPHSKAQAFHT

SEQ ID NO: 3328 - protein, 18 aa, synthetic construct
KTINGSGSPHSKAQKQQD

SEQ ID NO: 3329 - protein, 18 aa, synthetic construct
KTFSGSGSPHSKAQNLQT

SEQ ID NO: 3330 - protein, 18 aa, synthetic construct
KAINGSGSPHSKAQNAQT

SEQ ID NO: 3331 - protein, 18 aa, synthetic construct
KTESWSGSPHSKAQNQQT

SEQ ID NO: 3332 - protein, 18 aa, synthetic construct
KTTNGSGSPHSKAHNQLT

SEQ ID NO: 3333 - protein, 18 aa, synthetic construct
KTEDKSGSPHSKAQNQQT

SEQ ID NO: 3334 - protein, 18 aa, synthetic construct
KTESASGSPHSKAQNQQT

SEQ ID NO: 3335 - protein, 18 aa, synthetic construct
KTNNGSGSPHSKAQNQQY

SEQ ID NO: 3336 - protein, 18 aa, synthetic construct
KTDKMSGSPHSKAQNQQT

SEQ ID NO: 3337 - protein, 18 aa, synthetic construct
KEVHGSGSPHSKAQNQQT

SEQ ID NO: 3338 - protein, 18 aa, synthetic construct
KTINGSGSPHSKAQKLNT

SEQ ID NO: 3339 - protein, 18 aa, synthetic construct
KTTNGSGSPHSKAQYQHT

SEQ ID NO: 3340 - protein, 18 aa, synthetic construct
KTISGSGSPHSKAQYQHT

SEQ ID NO: 3341 - protein, 18 aa, synthetic construct
KTESTSGSPHSKAQNQQT

SEQ ID NO: 3342 - protein, 18 aa, synthetic construct
KTINGSGSPHSKSQNVQT

SEQ ID NO: 3343 - protein, 18 aa, synthetic construct
KSINGSGSPHSKAQAQQT

SEQ ID NO: 3344 - protein, 18 aa, synthetic construct
KTVNGSGSPHSKAQNLQA

SEQ ID NO: 3345 - protein, 18 aa, synthetic construct
KTVRDSGSPHSKAQNQQT

SEQ ID NO: 3346 - protein, 18 aa, synthetic construct
KTFNASGSPHSKAPNQQT

SEQ ID NO: 3347 - protein, 18 aa, synthetic construct
KTDRMSGSPHSKAQNQQT

SEQ ID NO: 3348 - protein, 18 aa, synthetic construct
KTINGSGSPHSKAQTPPT

SEQ ID NO: 3349 - protein, 18 aa, synthetic construct
ETIKGSGSPHSKAQNQQT

SEQ ID NO: 3350 - protein, 18 aa, synthetic construct
KNHIGSGSPHSKAQNQQT

SEQ ID NO: 3351 - protein, 18 aa, synthetic construct
KTINGSGSPHSKAQYQHA

SEQ ID NO: 3352 - protein, 18 aa, synthetic construct
KTINGSGSPHSKAQGQQA

SEQ ID NO: 3353 - protein, 18 aa, synthetic construct
KTFNGSGSPHNKAQNHQT

SEQ ID NO: 3354 - protein, 18 aa, synthetic construct
KESDGSGSPHSKAQNQQT

SEQ ID NO: 3355 - protein, 18 aa, synthetic construct
KTINGSGSPHSKAQPPAT

SEQ ID NO: 3356 - protein, 18 aa, synthetic construct
KTINGSGSPHSKAQERPT

SEQ ID NO: 3357 - protein, 18 aa, synthetic construct
KTIKGSGSPHSKAQDLQT

SEQ ID NO: 3358 - protein, 18 aa, synthetic construct
KTDLKSGSPHSKAQNQQT

SEQ ID NO: 3359 - protein, 18 aa, synthetic construct
KTINGSGSPHSKAQAMHT

SEQ ID NO: 3360 - protein, 18 aa, synthetic construct
KTVPNSGSPHSKAQNQQT

SEQ ID NO: 3361 - protein, 18 aa, synthetic construct
KTVIGSGSPHSKALNQQT

SEQ ID NO: 3362 - protein, 18 aa, synthetic construct
KTINGSGSPHSKAQHPST

SEQ ID NO: 3363 - protein, 18 aa, synthetic construct
KTINGSGSPHSKAPGLQT

SEQ ID NO: 3364 - protein, 18 aa, synthetic construct
KTINGSGSPHSKAQGIRT

SEQ ID NO: 3365 - protein, 18 aa, synthetic construct
KTESHSGSPHSKAQNQQT

SEQ ID NO: 3366 - protein, 18 aa, synthetic construct
KTINGSGSPHSKAQAPAT

SEQ ID NO: 3367 - protein, 18 aa, synthetic construct
KTINGSGSPHSKSQSQQI

SEQ ID NO: 3368 - protein, 18 aa, synthetic construct
KAEHGSGSPHSKAQNQQT

SEQ ID NO: 3369 - protein, 18 aa, synthetic construct
KTEDRSGSPHSKAQNQQT

SEQ ID NO: 3370 - protein, 18 aa, synthetic construct
KNCLGSGSPHSKAQNQQT

SEQ ID NO: 3371 - protein, 18 aa, synthetic construct
KTDRGSGSPHSKAQNQQT

SEQ ID NO: 3372 - protein, 18 aa, synthetic construct
KTINGSGSPHSKAQIPPT

SEQ ID NO: 3373 - protein, 18 aa, synthetic construct
KTVKGSGSPHSKAQDQQT

SEQ ID NO: 3374 - protein, 18 aa, synthetic construct
KNADGSGSPHSKAQNQQT

SEQ ID NO: 3375 - protein, 18 aa, synthetic construct
KTDKVSGSPHSKAQNQQT

SEQ ID NO: 3376 - protein, 18 aa, synthetic construct
KTITGSGSPHSKAQTQLT

SEQ ID NO: 3377 - protein, 18 aa, synthetic construct
KTINGSGSPHSKAQAPST

SEQ ID NO: 3378 - protein, 18 aa, synthetic construct
KNCVGSGSPHSKAQNQQT

SEQ ID NO: 3379 - protein, 18 aa, synthetic construct
KTVKDSGSPHSKAQNQQT

SEQ ID NO: 3380 - protein, 18 aa, synthetic construct
KNALGSGSPHSKAQNQQT

SEQ ID NO: 3381 - protein, 18 aa, synthetic construct
KVINGSGSPHSKGQNQQT

SEQ ID NO: 3382 - protein, 18 aa, synthetic construct
KTSNASGSPHSKAHNQQT

SEQ ID NO: 3383 - protein, 18 aa, synthetic construct
KTINGSGSPHSKAQNTYA

SEQ ID NO: 3384 - protein, 18 aa, synthetic construct
KTINGSGSPHSKSQNQHI

SEQ ID NO: 3385 - protein, 18 aa, synthetic construct
KTEFVSGSPHSKAQNQQT

SEQ ID NO: 3386 - protein, 18 aa, synthetic construct
KTVNGSGSPHSKAQNHLT

SEQ ID NO: 3387 - protein, 18 aa, synthetic construct
KTREISGSPHSKAQNQQT

SEQ ID NO: 3388 - protein, 18 aa, synthetic construct
KTINGSGSPHSKAQIGMT

SEQ ID NO: 3389 - protein, 18 aa, synthetic construct
KTIDGSGSPHSKALNKQT

SEQ ID NO: 3390 - protein, 18 aa, synthetic construct
KQGEGSGSPHSKAQNQQT

SEQ ID NO: 3391 - protein, 18 aa, synthetic construct
KTVNGSGSPHSKAQLQQT

SEQ ID NO: 3392 - protein, 18 aa, synthetic construct
KSINGSGSPHSKTQSQQT

SEQ ID NO: 3393 - protein, 18 aa, synthetic construct
KSEKGSGSPHSKAQNQQT

SEQ ID NO: 3394 - protein, 18 aa, synthetic construct
KNVNGSGSPHSKAQNQQT

SEQ ID NO: 3395 - protein, 18 aa, synthetic construct
KGGEGSGSPHSKAQNQQT

SEQ ID NO: 3396 - protein, 18 aa, synthetic construct
KTINGSGSPHSKAQRMST

SEQ ID NO: 3397 - protein, 18 aa, synthetic construct
KTINGSGSPHSKAQGILT

SEQ ID NO: 3398 - protein, 18 aa, synthetic construct
KEFVGSGSPHSKAQNQQT

SEQ ID NO: 3399 - protein, 18 aa, synthetic construct
KTIIGSGSPHSKAQDRQT

SEQ ID NO: 3400 - protein, 18 aa, synthetic construct
KSDKGSGSPHSKAQNQQT

SEQ ID NO: 3401 - protein, 18 aa, synthetic construct
KTEQVSGSPHSKAQNQQT

SEQ ID NO: 3402 - protein, 18 aa, synthetic construct
KTEHVSGSPHSKAQNQQT

SEQ ID NO: 3403 - protein, 18 aa, synthetic construct
KTINGSGSPHSKARDWQT

SEQ ID NO: 3404 - protein, 18 aa, synthetic construct
KTENASGSPHSKAQNQQT

SEQ ID NO: 3405 - protein, 18 aa, synthetic construct
KEVQGSGSPHSKAQNQQT

SEQ ID NO: 3406 - protein, 18 aa, synthetic construct
KTINGSGSPHSKAQNTHD

SEQ ID NO: 3407 - protein, 18 aa, synthetic construct
KTINGSGSPHSKAPNLQI

SEQ ID NO: 3408 - protein, 18 aa, synthetic construct
KTINGSGSPHSKAQERST

SEQ ID NO: 3409 - protein, 18 aa, synthetic construct
KTSNGSGSPHSKAQNYQT

SEQ ID NO: 3410 - protein, 18 aa, synthetic construct
KTEYISGSPHSKAQNQQT

SEQ ID NO: 3411 - protein, 18 aa, synthetic construct
KTINGSGSPHSKAQRTCT

SEQ ID NO: 3412 - protein, 18 aa, synthetic construct
KTINGSGSPHSKAQIGHT

SEQ ID NO: 3413 - protein, 18 aa, synthetic construct
KNCWGSGSPHSKAQNQQT

SEQ ID NO: 3414 - protein, 18 aa, synthetic construct
KTINGSGSPHSKAQGAIT

SEQ ID NO: 3415 - protein, 18 aa, synthetic construct
KTDVNSGSPHSKAQNQQT

SEQ ID NO: 3416 - protein, 18 aa, synthetic construct
KSDIGSGSPHSKAQNQQT

SEQ ID NO: 3417 - protein, 18 aa, synthetic construct
KTINGSGSPHSKAQVPPT

SEQ ID NO: 3418 - protein, 18 aa, synthetic construct
KTINGSGSPHSKAQVQQI

SEQ ID NO: 3419 - protein, 18 aa, synthetic construct
KTINGSGSPHSKALMRQT

SEQ ID NO: 3420 - protein, 18 aa, synthetic construct
KTINGSGSPHSKAQYSVT

SEQ ID NO: 3421 - protein, 18 aa, synthetic construct
KNSIGSGSPHSKAQNQQT

SEQ ID NO: 3422 - protein, 18 aa, synthetic construct
KTINGSGSPHSKVPNLQT

SEQ ID NO: 3423 - protein, 18 aa, synthetic construct
KAINGSGSPHSKAQSQQI

SEQ ID NO: 3424 - protein, 18 aa, synthetic construct
KTINGSGSPHSKAQAITT

SEQ ID NO: 3425 - protein, 18 aa, synthetic construct
KTINGSGSPHSKAQKTLT

SEQ ID NO: 3426 - protein, 18 aa, synthetic construct
KTVNGSGSPHSKAQNQWT

SEQ ID NO: 3427 - protein, 18 aa, synthetic construct
KTINGSGSPHSKAQLHHT

SEQ ID NO: 3428 - protein, 18 aa, synthetic construct
KTEQTSGSPHSKAQNQQT

SEQ ID NO: 3429 - protein, 18 aa, synthetic construct
KTINGSGSPHSKAQNIII

SEQ ID NO: 3430 - protein, 18 aa, synthetic construct
KNSLGSGSPHSKAQNQQT

SEQ ID NO: 3431 - protein, 18 aa, synthetic construct
KTINGSGSPHSKAQGHHT

SEQ ID NO: 3432 - protein, 18 aa, synthetic construct
KTDRTSGSPHSKAQNQQT

SEQ ID NO: 3433 - protein, 18 aa, synthetic construct
KTINGSGSPHSKAQSKVT

SEQ ID NO: 3434 - protein, 18 aa, synthetic construct
KEVVGSGSPHSKAQNQQT

SEQ ID NO: 3435 - protein, 18 aa, synthetic construct
KTINGSGSPHSKAQLPST

SEQ ID NO: 3436 - protein, 18 aa, synthetic construct
KTINGSGSPHSKAIGKQT

SEQ ID NO: 3437 - protein, 18 aa, synthetic construct
KTEPTSGSPHSKAQNQQT

SEQ ID NO: 3438 - protein, 18 aa, synthetic construct
KTINGSGSPHSKAQAIHT

SEQ ID NO: 3439 - protein, 18 aa, synthetic construct
KTINGSGSPHSKAQHGLT

SEQ ID NO: 3440 - protein, 18 aa, synthetic construct
KSELGSGSPHSKAQNQQT

SEQ ID NO: 3441 - protein, 18 aa, synthetic construct
KTINGSGSPHSKAQFMCT

SEQ ID NO: 3442 - protein, 18 aa, synthetic construct
KTINVSGSPHSKAQGQQT

SEQ ID NO: 3443 - protein, 18 aa, synthetic construct
KTVNGSGSPHSKAQHLQT

SEQ ID NO: 3444 - protein, 18 aa, synthetic construct
KTINGSGSPHSKTQNHQN

SEQ ID NO: 3445 - protein, 18 aa, synthetic construct
KTINGSGSPHSKAQPART

SEQ ID NO: 3446 - protein, 18 aa, synthetic construct
KTVNGSGSPHSKAQSLQT

SEQ ID NO: 3447 - protein, 18 aa, synthetic construct
KTINGSGSPHSKSQSQLT

SEQ ID NO: 3448 - protein, 18 aa, synthetic construct
KTWQNSGSPHSKAQNQQT

SEQ ID NO: 3449 - protein, 18 aa, synthetic construct
KTINGSGSPHSKAQDRQS

SEQ ID NO: 3450 - protein, 18 aa, synthetic construct
KTINGSGSPHSKAQMPST

SEQ ID NO: 3451 - protein, 18 aa, synthetic construct
KTINGSGSPHSKAQGSLT

SEQ ID NO: 3452 - protein, 18 aa, synthetic construct
KTEVTSGSPHSKAQNQQT

SEQ ID NO: 3453 - protein, 18 aa, synthetic construct
KTVIGSGSPHSKSQNQQT

SEQ ID NO: 3454 - protein, 18 aa, synthetic construct
KAVNVSGSPHSKAQNQQT

SEQ ID NO: 3455 - protein, 18 aa, synthetic construct
KTDRNSGSPHSKAQNQQT

SEQ ID NO: 3456 - protein, 18 aa, synthetic construct
KTINGSGSPHSKAQVPAT

SEQ ID NO: 3457 - protein, 18 aa, synthetic construct
KGVLGSGSPHSKAQNQQT

SEQ ID NO: 3458 - protein, 18 aa, synthetic construct
KAINGSGSPHSKAQDKQT

SEQ ID NO: 3459 - protein, 18 aa, synthetic construct
KTSNGSGSPHSKAHYQQT

SEQ ID NO: 3460 - protein, 18 aa, synthetic construct
KTINGSGSPHSKAQVPST

SEQ ID NO: 3461 - protein, 18 aa, synthetic construct
KTELRSGSPHSKAQNQQT

SEQ ID NO: 3462 - protein, 18 aa, synthetic construct
KNINGSGSPHSKAQNHQT

SEQ ID NO: 3463 - protein, 18 aa, synthetic construct
KTINGSGSPHSKARGEQT

SEQ ID NO: 3464 - protein, 18 aa, synthetic construct
KTEDLSGSPHSKAQNQQT

SEQ ID NO: 3465 - protein, 18 aa, synthetic construct
KTINGSGSPHSKAPGQQT

SEQ ID NO: 3466 - protein, 18 aa, synthetic construct
KTINGSGSPHSKAQSLQI

SEQ ID NO: 3467 - protein, 18 aa, synthetic construct
KTINGSGSPHSKRLEQQT

SEQ ID NO: 3468 - protein, 18 aa, synthetic construct
KTERGSGSPHSKAQNQQT

SEQ ID NO: 3469 - protein, 18 aa, synthetic construct
KTVNGSGSPHSKAPNQQT

SEQ ID NO: 3470 - protein, 18 aa, synthetic construct
KTSNGSGSPHSKAQNQST

SEQ ID NO: 3471 - protein, 18 aa, synthetic construct
KTINGSGSPHSKAQKVIT

SEQ ID NO: 3472 - protein, 18 aa, synthetic construct
KTEGISGSPHSKAQNQQT

SEQ ID NO: 3473 - protein, 18 aa, synthetic construct
KTINGSGSPHSKAQNNDQ

SEQ ID NO: 3474 - protein, 18 aa, synthetic construct
KTINGSGSPHSKAQSVHT

SEQ ID NO: 3475 - protein, 18 aa, synthetic construct
KTINGSGSPHSKAQPLGT

SEQ ID NO: 3476 - protein, 18 aa, synthetic construct
KTCNASGSPHSKAQNQQT

SEQ ID NO: 3477 - protein, 18 aa, synthetic construct
KAINGSGSPHSKAHNQET

SEQ ID NO: 3478 - protein, 18 aa, synthetic construct
KTEGLSGSPHSKAQNQQT

SEQ ID NO: 3479 - protein, 18 aa, synthetic construct
KTRDASGSPHSKAQNQQT

SEQ ID NO: 3480 - protein, 18 aa, synthetic construct
KTSNGSGSPHSKAQNLQI

SEQ ID NO: 3481 - protein, 18 aa, synthetic construct
KTGNGSGSPHSKAQIQQT

SEQ ID NO: 3482 - protein, 18 aa, synthetic construct
KTDRSSGSPHSKAQNQQT

SEQ ID NO: 3483 - protein, 18 aa, synthetic construct
KTINGSGSPHSKAQVRNT

SEQ ID NO: 3484 - protein, 18 aa, synthetic construct
KTINGSGSPHSKAPSNQT

SEQ ID NO: 3485 - protein, 18 aa, synthetic construct
KTINGSGSPHSKAQVGHT

SEQ ID NO: 3486 - protein, 18 aa, synthetic construct
KNAIGSGSPHSKAQNQQT

SEQ ID NO: 3487 - protein, 18 aa, synthetic construct
KAENGSGSPHSKAQNQQT

SEQ ID NO: 3488 - protein, 18 aa, synthetic construct
KTINGSGSPHSKAQRDIT

SEQ ID NO: 3489 - protein, 18 aa, synthetic construct
KTINGSGSPHSKAQMPNT

SEQ ID NO: 3490 - protein, 18 aa, synthetic construct
KTVNGSGSPHSKSQNQQT

SEQ ID NO: 3491 - protein, 18 aa, synthetic construct
KTINGSGSPHSKARGLQT

SEQ ID NO: 3492 - protein, 18 aa, synthetic construct
KTELGSGSPHSKAQNQQT

SEQ ID NO: 3493 - protein, 18 aa, synthetic construct
KAETGSGSPHSKAQNQQT

SEQ ID NO: 3494 - protein, 18 aa, synthetic construct
KTINGSGSPHSKLQKQQT

SEQ ID NO: 3495 - protein, 18 aa, synthetic construct
KTINGSGSPHSKAPSLQT

SEQ ID NO: 3496 - protein, 18 aa, synthetic construct
KTINGSGSPHSKAQRDQT

SEQ ID NO: 3497 - protein, 18 aa, synthetic construct
KTDVGSGSPHSKAQNQQT

SEQ ID NO: 3498 - protein, 18 aa, synthetic construct
KTINGSGSPHSKNRDQQT

SEQ ID NO: 3499 - protein, 18 aa, synthetic construct
KSINGSGSPHSKAPNLQT

SEQ ID NO: 3500 - protein, 18 aa, synthetic construct
KTINGSGSPHSKAQAKGT

SEQ ID NO: 3501 - protein, 18 aa, synthetic construct
KTVNGSGSPHSKAQDKQT

SEQ ID NO: 3502 - protein, 18 aa, synthetic construct
KTINGSGSPHSKAQSAHT

SEQ ID NO: 3503 - protein, 18 aa, synthetic construct
KTVPTSGSPHSKAQNQQT

SEQ ID NO: 3504 - protein, 18 aa, synthetic construct
KTIDGSGSPHSKSQNHQT

SEQ ID NO: 3505 - protein, 18 aa, synthetic construct
KTDVKSGSPHSKAQNQQT

SEQ ID NO: 3506 - protein, 18 aa, synthetic construct
KAINRSGSPHSKAQDQQT

SEQ ID NO: 3507 - protein, 18 aa, synthetic construct
KTINGSGSPHSKAQSTMT

SEQ ID NO: 3508 - protein, 18 aa, synthetic construct
KTVNASGSPHSKAQNQLT

SEQ ID NO: 3509 - protein, 18 aa, synthetic construct
KTINGSGSPHSKAQREMT

SEQ ID NO: 3510 - protein, 18 aa, synthetic construct
KTVHGSGSPHSKAQSQQT

SEQ ID NO: 3511 - protein, 18 aa, synthetic construct
KTINGSGSPHSKAQYRAT

SEQ ID NO: 3512 - protein, 18 aa, synthetic construct
KTEPMSGSPHSKAQNQQT

SEQ ID NO: 3513 - protein, 18 aa, synthetic construct
KTINGSGSPHSKNQWQQT

SEQ ID NO: 3514 - protein, 18 aa, synthetic construct
KETAGSGSPHSKAQNQQT

SEQ ID NO: 3515 - protein, 18 aa, synthetic construct
KTINGSGSPHSKAQRMNT

SEQ ID NO: 3516 - protein, 18 aa, synthetic construct
KNNLGSGSPHSKAQNQQT

SEQ ID NO: 3517 - protein, 18 aa, synthetic construct
KTINGSGSPHAKAQNHQT

SEQ ID NO: 3518 - protein, 18 aa, synthetic construct
KTINGSGSPHSKAGDSQT

SEQ ID NO: 3519 - protein, 18 aa, synthetic construct
KTINGSGSPHSKLKSQQT

SEQ ID NO: 3520 - protein, 18 aa, synthetic construct
KTINGSGSPHSKAQKIST

SEQ ID NO: 3521 - protein, 18 aa, synthetic construct
KTEYNSGSPHSKAQNQQT

SEQ ID NO: 3522 - protein, 18 aa, synthetic construct
KTINGSGSPHSKAPSMQT

SEQ ID NO: 3523 - protein, 18 aa, synthetic construct
EAINGSGSPHSKAQNQQT

SEQ ID NO: 3524 - protein, 18 aa, synthetic construct
KTINGSGSPHSKASPRQT

SEQ ID NO: 3525 - protein, 18 aa, synthetic construct
KTINGSGSPHSKRMEQQT

SEQ ID NO: 3526 - protein, 18 aa, synthetic construct
KTINGSGSPHSKAQYQNT

SEQ ID NO: 3527 - protein, 18 aa, synthetic construct
KEINGRGSPHSKAQNQQT

SEQ ID NO: 3528 - protein, 18 aa, synthetic construct
KTVNRNGSPHSKAQNQQT

SEQ ID NO: 3529 - protein, 18 aa, synthetic construct
KTINGPGSPHSKAHNQQT

SEQ ID NO: 3530 - protein, 18 aa, synthetic construct
KTSYGNGSPHSKAQNQQT

SEQ ID NO: 3531 - protein, 18 aa, synthetic construct
KSVNGNGSPHSKAQNQQT

SEQ ID NO: 3532 - protein, 18 aa, synthetic construct
KTINGSGSPHGWVQNQQT

SEQ ID NO: 3533 - protein, 18 aa, synthetic construct
KTINGGGSPHSKAQTQQI

SEQ ID NO: 3534 - protein, 18 aa, synthetic construct
KTVHGNGSPHSKAQNQQT

SEQ ID NO: 3535 - protein, 18 aa, synthetic construct
KTINGGGSPHSKAQNQQC

SEQ ID NO: 3536 - protein, 18 aa, synthetic construct
KTIDGGGSPHSKAQNKQT

SEQ ID NO: 3537 - protein, 18 aa, synthetic construct
KTINGGGSPHSKAQNQLI

SEQ ID NO: 3538 - protein, 18 aa, synthetic construct
KNINGGGSPHSKAQNQQT

SEQ ID NO: 3539 - protein, 18 aa, synthetic construct
KTINGGGSPHSKSQNQLT

SEQ ID NO: 3540 - protein, 18 aa, synthetic construct
KTVNGNGSPHSKAQNKQT

SEQ ID NO: 3541 - protein, 18 aa, synthetic construct
KTVNGNGSPHSKAQNQHT

SEQ ID NO: 3542 - protein, 18 aa, synthetic construct
KTINGGGSPHSKALNQQN

SEQ ID NO: 3543 - protein, 18 aa, synthetic construct
KTINGTGSPHSKAQNHQI

SEQ ID NO: 3544 - protein, 18 aa, synthetic construct
KTIIGGGSPHSKAHNQQT

SEQ ID NO: 3545 - protein, 18 aa, synthetic construct
KTINGNGSPHSKAQNPLT

SEQ ID NO: 3546 - protein, 18 aa, synthetic construct
KSIKGNGSPHSKAQNQQT

SEQ ID NO: 3547 - protein, 18 aa, synthetic construct
KTINGGGSPHSKAQSQQI

SEQ ID NO: 3548 - protein, 18 aa, synthetic construct
KTINGSVSPHGKAQNQLT

SEQ ID NO: 3549 - protein, 18 aa, synthetic construct
KTINGIGSPHSKAQNLGT

SEQ ID NO: 3550 - protein, 18 aa, synthetic construct
KTVNGNGSPHSKAQNHQT

SEQ ID NO: 3551 - protein, 18 aa, synthetic construct
KTSNGGGSPHSKAQNLQT

SEQ ID NO: 3552 - protein, 18 aa, synthetic construct
KTINGGGSPHSKSQNQHT

SEQ ID NO: 3553 - protein, 18 aa, synthetic construct
KTVNGGGSPHSKAQSQQT

SEQ ID NO: 3554 - protein, 18 aa, synthetic construct
KTIPIDGSPHSKAQNQQT

SEQ ID NO: 3555 - protein, 18 aa, synthetic construct
KTINGGGSPHSKAQNPPT

SEQ ID NO: 3556 - protein, 18 aa, synthetic construct
KTINGLGSPHSKSQNQQT

SEQ ID NO: 3557 - protein, 18 aa, synthetic construct
KTINGTGSPHSKAQNQQM

SEQ ID NO: 3558 - protein, 18 aa, synthetic construct
KTIRDAGSPHSKAQNQQT

SEQ ID NO: 3559 - protein, 18 aa, synthetic construct
KTVNGGGSPHSKAQNQQS

SEQ ID NO: 3560 - protein, 18 aa, synthetic construct
KTIQDGGSPHSKAQNQQT

SEQ ID NO: 3561 - protein, 18 aa, synthetic construct
KTISGGGSPHSKAQNQQN

SEQ ID NO: 3562 - protein, 18 aa, synthetic construct
KTINGGGSPHSKAQDKQT

SEQ ID NO: 3563 - protein, 18 aa, synthetic construct
KTIIGGGSPHSKAQNPQT

SEQ ID NO: 3564 - protein, 18 aa, synthetic construct
KTINGTGSPHSKAPNQLT

SEQ ID NO: 3565 - protein, 18 aa, synthetic construct
KTFNGGGSPHSKAQYQQT

SEQ ID NO: 3566 - protein, 18 aa, synthetic construct
KTVNGGGSPHSKAQHQQT

SEQ ID NO: 3567 - protein, 18 aa, synthetic construct
KTIPMEGSPHSKAQNQQT

SEQ ID NO: 3568 - protein, 18 aa, synthetic construct
KTVNGGGSPHSKSQNQQT

SEQ ID NO: 3569 - protein, 18 aa, synthetic construct
KTINGGGSPHSKAQNQMT

SEQ ID NO: 3570 - protein, 18 aa, synthetic construct
KTIRENGSPHSKAQNQQT

SEQ ID NO: 3571 - protein, 18 aa, synthetic construct
KTINGSASPHSKAHSQQT

SEQ ID NO: 3572 - protein, 18 aa, synthetic construct
KTNNGGGSPHSKAQNLQT

SEQ ID NO: 3573 - protein, 18 aa, synthetic construct
KSINGGGSPHSKAQYQQT

SEQ ID NO: 3574 - protein, 18 aa, synthetic construct
KTVNGNGSPHSKSQNQQT

SEQ ID NO: 3575 - protein, 18 aa, synthetic construct
KTLNGNGSPHSKAQNLQT

SEQ ID NO: 3576 - protein, 18 aa, synthetic construct
KTINGSGSSHSKAQNQQT

SEQ ID NO: 3577 - protein, 18 aa, synthetic construct
KTVNGGGSPHSKAQNHQT

SEQ ID NO: 3578 - protein, 18 aa, synthetic construct
KTINGGGSPHSKAQYQHT

SEQ ID NO: 3579 - protein, 18 aa, synthetic construct
KTIPKNGSPHSKAQNQQT

SEQ ID NO: 3580 - protein, 18 aa, synthetic construct
KTINKEGSPHSKAQNQQT

SEQ ID NO: 3581 - protein, 18 aa, synthetic construct
KTVNGGGSPHSKAQNLQT

SEQ ID NO: 3582 - protein, 18 aa, synthetic construct
KTIPAIGSPHSKAQNQQT

SEQ ID NO: 3583 - protein, 18 aa, synthetic construct
KTINGGGSPHSKAQNPQA

SEQ ID NO: 3584 - protein, 18 aa, synthetic construct
KTINGNGSPHSKSQNQHT

SEQ ID NO: 3585 - protein, 18 aa, synthetic construct
KTINGGGSPHSKSQNRQT

SEQ ID NO: 3586 - protein, 18 aa, synthetic construct
KTINGGGSPHSKAQRQQT

SEQ ID NO: 3587 - protein, 18 aa, synthetic construct
KTIIKNGSPHSKAQNQQT

SEQ ID NO: 3588 - protein, 18 aa, synthetic construct
KTINGSGSPHSYHVNQQT

SEQ ID NO: 3589 - protein, 18 aa, synthetic construct
KTERVSGSPHSKAQNQQT

SEQ ID NO: 3590 - skipped

SEQ ID NO: 3591 - protein, 18 aa, synthetic construct
KTFNRSGSPHSKAQNQQI

SEQ ID NO: 3592 - protein, 18 aa, synthetic construct
KTINGSGSPHTKAQNPPT

SEQ ID NO: 3593 - protein, 18 aa, synthetic construct
KSLNGSGSPHTKAQNQQT

SEQ ID NO: 3594 - protein, 18 aa, synthetic construct
KTENKSGSPHSKAQNQQT

SEQ ID NO: 3595 - protein, 18 aa, synthetic construct
KTDKGSGSPHSKAQNQQT

SEQ ID NO: 3596 - protein, 18 aa, synthetic construct
KTSNASGSPHSKAQHQQT

SEQ ID NO: 3597 - protein, 18 aa, synthetic construct
KTINASGSPHSKAINQQT

SEQ ID NO: 3598 - protein, 18 aa, synthetic construct
KTINGSGSPHSKAPNQQH

SEQ ID NO: 3599 - protein, 18 aa, synthetic construct
KTVNASGSPHSKAQNHQT

SEQ ID NO: 3600 - protein, 18 aa, synthetic construct
KTIDGSGSPHSKAENRQT

SEQ ID NO: 3601 - protein, 18 aa, synthetic construct
KTIKGSGSPHSKVQDQQT

SEQ ID NO: 3602 - protein, 18 aa, synthetic construct
KAINGSGSPHSKAQTQQA

SEQ ID NO: 3603 - protein, 18 aa, synthetic construct
KTEAKSGSPHSKAQNQQT

SEQ ID NO: 3604 - protein, 18 aa, synthetic construct
KTIPGSGSPHSKAQNLQT

SEQ ID NO: 3605 - protein, 18 aa, synthetic construct
KTIHGSGSPHSKAQNQAT

SEQ ID NO: 3606 - protein, 18 aa, synthetic construct
KAINGHDSPHKSGQIRQT

SEQ ID NO: 3607 - protein, 18 aa, synthetic construct
KTINGHDSPHKIGQNQHA

SEQ ID NO: 3608 - protein, 18 aa, synthetic construct
KAINGYDSPHKSGQKQQT

SEQ ID NO: 3609 - protein, 18 aa, synthetic construct
KTESGHDSPHKSGQNQQT

SEQ ID NO: 3610 - protein, 18 aa, synthetic construct
KTINGHDSPHKSGQSVQT

SEQ ID NO: 3611 - protein, 18 aa, synthetic construct
TTINGHDSPHKSGQNQQT

SEQ ID NO: 3612 - protein, 18 aa, synthetic construct
KTINGHESPHKSGRSQQT

SEQ ID NO: 3613 - protein, 18 aa, synthetic construct
KTINGHDSPHKSGQNKLE

SEQ ID NO: 3614 - protein, 18 aa, synthetic construct
KTINGHDSPHKTGQNQQK

SEQ ID NO: 3615 - protein, 18 aa, synthetic construct
KAINGHDNPHKSGQNQQT

SEQ ID NO: 3616 - protein, 18 aa, synthetic construct
KTINGQDSPHKSGQHQQA

SEQ ID NO: 3617 - protein, 18 aa, synthetic construct
KSINGHDSPHKSGQIQHT

SEQ ID NO: 3618 - protein, 18 aa, synthetic construct
KAINGHDSPHKSGPRQQT

SEQ ID NO: 3619 - protein, 18 aa, synthetic construct
KTVNGHDSPHKSGHTQQT

SEQ ID NO: 3620 - protein, 18 aa, synthetic construct
KSINGHDSPHKSGQRQHT

SEQ ID NO: 3621 - protein, 18 aa, synthetic construct
KAINGHDSPHKSAQSQQT

SEQ ID NO: 3622 - protein, 18 aa, synthetic construct
KSIYGHESPHKSGQNQQS

SEQ ID NO: 3623 - protein, 18 aa, synthetic construct
KTVNGHDSPHKSLQNQQT

SEQ ID NO: 3624 - protein, 18 aa, synthetic construct
KTSNGYDSPHKSGQKQQT

SEQ ID NO: 3625 - protein, 18 aa, synthetic construct
KTVNGHDSPHKSGRNQET

SEQ ID NO: 3626 - protein, 18 aa, synthetic construct
KTTNGHDSPHKSGQTQLT

SEQ ID NO: 3627 - protein, 18 aa, synthetic construct
KAINGHDSPHKSEKNQQT

SEQ ID NO: 3628 - protein, 18 aa, synthetic construct
KIINGRDSPHKSGQDQQT

SEQ ID NO: 3629 - protein, 18 aa, synthetic construct
KTISGHDSPHKTGHNQQT

SEQ ID NO: 3630 - protein, 18 aa, synthetic construct
KTVNAHDSPHKSGQNQLT

SEQ ID NO: 3631 - protein, 18 aa, synthetic construct
KSINGYDSPHKSGQTQQT

SEQ ID NO: 3632 - protein, 18 aa, synthetic construct
KTINGHESPHKSGQTQQI

SEQ ID NO: 3633 - protein, 18 aa, synthetic construct
KTINGHDSPHKSGQSKQA

SEQ ID NO: 3634 - protein, 18 aa, synthetic construct
KAIIGHESPHKSGQNQQT

SEQ ID NO: 3635 - protein, 18 aa, synthetic construct
KTINGHDSPHKTGQNQPP

SEQ ID NO: 3636 - protein, 18 aa, synthetic construct
KAINGHDSPHKSGQSPQT

SEQ ID NO: 3637 - protein, 18 aa, synthetic construct
KTIKGNDSPHKSVQNQQT

SEQ ID NO: 3638 - protein, 18 aa, synthetic construct
KTEFGHDSPHKSGQNQQT

SEQ ID NO: 3639 - protein, 18 aa, synthetic construct
KTINGHDSPHKSAQNYQT

SEQ ID NO: 3640 - protein, 18 aa, synthetic construct
KTINAHDSPHKIGQNHQT

SEQ ID NO: 3641 - protein, 18 aa, synthetic construct
KTINGHESPHKSAQNRQT

SEQ ID NO: 3642 - protein, 18 aa, synthetic construct
KTTNGHDSPHKSGQNQQG

SEQ ID NO: 3643 - protein, 18 aa, synthetic construct
KTIKGQDSPHKIGQNQQT

SEQ ID NO: 3644 - protein, 18 aa, synthetic construct
KTVNGHDSPHKSGQNHLT

SEQ ID NO: 3645 - protein, 18 aa, synthetic construct
KSINGHDSPHKSGQYQHT

SEQ ID NO: 3646 - protein, 18 aa, synthetic construct
KTINGNDSPHKSVQNHQT

SEQ ID NO: 3647 - protein, 18 aa, synthetic construct
KTITGHDSPHKSGQNQWT

SEQ ID NO: 3648 - protein, 18 aa, synthetic construct
KTNNGHDSPHKSVQNQHT

SEQ ID NO: 3649 - protein, 18 aa, synthetic construct
KTIDGHDSPHKSGQNQHA

SEQ ID NO: 3650 - protein, 18 aa, synthetic construct
KTVNGHDSPHKSGQTRQT

SEQ ID NO: 3651 - protein, 18 aa, synthetic construct
KTVNGHDSPHKSGQNLHT

SEQ ID NO: 3652 - protein, 18 aa, synthetic construct
KAISGHDSPHKSGLNQQT

SEQ ID NO: 3653 - protein, 18 aa, synthetic construct
KAINGHDSPHKSAQNQET

SEQ ID NO: 3654 - protein, 18 aa, synthetic construct
KTITGHDSPHKSGQHLQT

SEQ ID NO: 3655 - protein, 18 aa, synthetic construct
KTINGHDSPHKSRLNQPT

SEQ ID NO: 3656 - protein, 18 aa, synthetic construct
KTVDGHDSPHKSGQKQQT

SEQ ID NO: 3657 - protein, 18 aa, synthetic construct
KTINGQDSPHKSGQNQDT

SEQ ID NO: 3658 - protein, 18 aa, synthetic construct
KTIEGHDSPHKSGRNQQT

SEQ ID NO: 3659 - protein, 18 aa, synthetic construct
KTTNGHDSPHKSGQNLLT

SEQ ID NO: 3660 - protein, 18 aa, synthetic construct
KTINGHDSPHKSGQLVIT

SEQ ID NO: 3661 - protein, 18 aa, synthetic construct
KTVNGHDSPHKSRQSQQT

SEQ ID NO: 3662 - protein, 18 aa, synthetic construct
KTINGHDSPHKSGRTQET

SEQ ID NO: 3663 - protein, 18 aa, synthetic construct
KTINGHDSPHKSVQTHQT

SEQ ID NO: 3664 - protein, 18 aa, synthetic construct
KTSNGHDSPHKSGQNQPA

SEQ ID NO: 3665 - protein, 18 aa, synthetic construct
KTEGKHDSPHKSGQNQQT

SEQ ID NO: 3666 - protein, 18 aa, synthetic construct
KVINGHDSPHKSGQTQQT

SEQ ID NO: 3667 - protein, 18 aa, synthetic construct
KTINGPDSPHKIGQNQQS

SEQ ID NO: 3668 - protein, 18 aa, synthetic construct
KAVNGHDSPHKSVQNQQT

SEQ ID NO: 3669 - protein, 18 aa, synthetic construct
KTINGHDSPHKSRQDQHT

SEQ ID NO: 3670 - protein, 18 aa, synthetic construct
KAINGPDSPHKSGQKQQT

SEQ ID NO: 3671 - protein, 18 aa, synthetic construct
KTINGHDSPHKSRQSQHT

SEQ ID NO: 3672 - protein, 18 aa, synthetic construct
KTIYGHDSPHKSVQNQLT

SEQ ID NO: 3673 - protein, 18 aa, synthetic construct
KTVNGHDSPHKSGQNLLT

SEQ ID NO: 3674 - protein, 18 aa, synthetic construct
KTESAHDSPHKSGQNQQT

SEQ ID NO: 3675 - protein, 18 aa, synthetic construct
KTTNGQDSPHKSGQNQQS

SEQ ID NO: 3676 - protein, 18 aa, synthetic construct
KTIDGHDSPHKSGRNQQI

SEQ ID NO: 3677 - protein, 18 aa, synthetic construct
KTINGYDSPHKSGQYQHT

SEQ ID NO: 3678 - protein, 18 aa, synthetic construct
KTDNGHDSPHKSRQNQQT

SEQ ID NO: 3679 - protein, 18 aa, synthetic construct
KTINGHDSPHKSWVRQQT

SEQ ID NO: 3680 - protein, 18 aa, synthetic construct
KTINGHESPHKSGQNQHS

SEQ ID NO: 3681 - protein, 18 aa, synthetic construct
KTVNGHDSPHKIGHNQQT

SEQ ID NO: 3682 - protein, 18 aa, synthetic construct
KTCNGHDSPHKSGRNQQT

SEQ ID NO: 3683 - protein, 18 aa, synthetic construct
KNVVGHDSPHKSGQNQQT

SEQ ID NO: 3684 - protein, 18 aa, synthetic construct
KTELWHDSPHKSGQNQQT

SEQ ID NO: 3685 - protein, 18 aa, synthetic construct
KTELRHDSPHKSGQNQQT

SEQ ID NO: 3686 - protein, 18 aa, synthetic construct
KTINGHDSPHKSNAWQQT

SEQ ID NO: 3687 - protein, 18 aa, synthetic construct
KTDAGHDSPHKSGQNQQT

SEQ ID NO: 3688 - protein, 18 aa, synthetic construct
KTEVGHDSPHKSGQNQQT

SEQ ID NO: 3689 - protein, 18 aa, synthetic construct
KTESRHDSPHKSGQNQQT

SEQ ID NO: 3690 - protein, 18 aa, synthetic construct
KSELGHDSPHKSGQNQQT

SEQ ID NO: 3691 - protein, 18 aa, synthetic construct
KTINGHDSPHKSGQSVPT

SEQ ID NO: 3692 - protein, 18 aa, synthetic construct
KTINGHESPHKSGQNIQP

SEQ ID NO: 3693 - protein, 18 aa, synthetic construct
KTEMKHDSPHKSGQNQQT

SEQ ID NO: 3694 - protein, 18 aa, synthetic construct
KTINGHDSPHKSVQNHLN

SEQ ID NO: 3695 - protein, 18 aa, synthetic construct
KTINGHDSPHKIGLDQQT

SEQ ID NO: 3696 - protein, 18 aa, synthetic construct
KTINGHDSPHKRGPDQQS

SEQ ID NO: 3697 - protein, 18 aa, synthetic construct
KTIKGHDSPHKSGESQQT

SEQ ID NO: 3698 - protein, 18 aa, synthetic construct
KTEGWHDSPHKSGQNQQT

SEQ ID NO: 3699 - protein, 18 aa, synthetic construct
KTINGHDSPHKHGQNHQT

SEQ ID NO: 3700 - protein, 18 aa, synthetic construct
KTEQLHDSPHKSGQNQQT

SEQ ID NO: 3701 - protein, 18 aa, synthetic construct
KTIIGHDSPHKSGQYQHT

SEQ ID NO: 3702 - protein, 18 aa, synthetic construct
KTSNGHDSPHKSVQNKQT

SEQ ID NO: 3703 - protein, 18 aa, synthetic construct
KIVNGQVSPHKSGQNQQT

SEQ ID NO: 3704 - protein, 18 aa, synthetic construct
KTVNGHDSPHKSGQRQLT

SEQ ID NO: 3705 - protein, 18 aa, synthetic construct
KTVNGHDSPHKIGQNQLT

SEQ ID NO: 3706 - protein, 18 aa, synthetic construct
KTINGHDSPHKSGQIIVT

SEQ ID NO: 3707 - protein, 18 aa, synthetic construct
KTEKIHDSPHKSGQNQQT

SEQ ID NO: 3708 - protein, 18 aa, synthetic construct
KTENAHDSPHKSGQNQQT

SEQ ID NO: 3709 - protein, 18 aa, synthetic construct
KIGNGHESPHKSGQNQQT

SEQ ID NO: 3710 - protein, 18 aa, synthetic construct
KEVMGHDSPHKSGQNQQT

SEQ ID NO: 3711 - protein, 18 aa, synthetic construct
KTEVKHDSPHKSGQNQQT

SEQ ID NO: 3712 - protein, 18 aa, synthetic construct
KTINGYDSPHKSGQKQST

SEQ ID NO: 3713 - protein, 18 aa, synthetic construct
KYQVGHDSPHKSGQNQQT

SEQ ID NO: 3714 - protein, 18 aa, synthetic construct
KTEAMHDSPHKSGQNQQT

SEQ ID NO: 3715 - protein, 18 aa, synthetic construct
KTIKGDDSPHKSVQNQQT

SEQ ID NO: 3716 - protein, 18 aa, synthetic construct
KTINGHDSPHKSVQSHQT

SEQ ID NO: 3717 - protein, 18 aa, synthetic construct
KTINGHDSPHKSGQFVVT

SEQ ID NO: 3718 - protein, 18 aa, synthetic construct
KTVNGHDSPHKSRQNLQT

SEQ ID NO: 3719 - protein, 18 aa, synthetic construct
KATNGHNSPHKSGQNQET

SEQ ID NO: 3720 - protein, 18 aa, synthetic construct
KAINGHDSPHKSAQNQQI

SEQ ID NO: 3721 - protein, 18 aa, synthetic construct
KTEHGHDSPHKSGQNQQT

SEQ ID NO: 3722 - protein, 18 aa, synthetic construct
KTVENHDSPHKSGQNQQT

SEQ ID NO: 3723 - protein, 18 aa, synthetic construct
KTIYGHDSPHKSGQSQPT

SEQ ID NO: 3724 - protein, 18 aa, synthetic construct
KTISGHESPHKSGQNEQT

SEQ ID NO: 3725 - protein, 18 aa, synthetic construct
KAIIGHDSPHKSAQNQQT

SEQ ID NO: 3726 - protein, 18 aa, synthetic construct
KAIDGHDSPHKSGQNQLT

SEQ ID NO: 3727 - protein, 18 aa, synthetic construct
KTIMGHDSPHKSVQNQQT

SEQ ID NO: 3728 - protein, 18 aa, synthetic construct
KEVGGHDSPHKSGQNQQT

SEQ ID NO: 3729 - protein, 18 aa, synthetic construct
KTINGHDSPHKSAQNLLT

SEQ ID NO: 3730 - protein, 18 aa, synthetic construct
KTEFTHDSPHKSGQNQQT

SEQ ID NO: 3731 - protein, 18 aa, synthetic construct
KSEMGHDSPHKSGQNQQT

SEQ ID NO: 3732 - protein, 18 aa, synthetic construct
KAQQGHDSPHKSGQNQQT

SEQ ID NO: 3733 - protein, 18 aa, synthetic construct
KTEVMHDSPHKSGQNQQT

SEQ ID NO: 3734 - protein, 18 aa, synthetic construct
KAINGHDSPHKSGQSLQT

SEQ ID NO: 3735 - protein, 18 aa, synthetic construct
KCGEGHDSPHKSGQNQQT

SEQ ID NO: 3736 - protein, 18 aa, synthetic construct
KTVNGHDSPHKSAQNHQT

SEQ ID NO: 3737 - protein, 18 aa, synthetic construct
KTVNGHDSPHKSGQTQLT

SEQ ID NO: 3738 - protein, 18 aa, synthetic construct
KTNNGHDSPHKSGRNRQT

SEQ ID NO: 3739 - protein, 18 aa, synthetic construct
KTCNEHDSPHKSGQNQQT

SEQ ID NO: 3740 - protein, 18 aa, synthetic construct
KTINGHDSPHKYGQNEQT

SEQ ID NO: 3741 - protein, 18 aa, synthetic construct
KASNRHDSPHKSGHNQQT

SEQ ID NO: 3742 - protein, 18 aa, synthetic construct
KTETKHDSPHKSGQNQQT

SEQ ID NO: 3743 - protein, 18 aa, synthetic construct
KSINGHDSPHKSQQNQQT

SEQ ID NO: 3744 - protein, 18 aa, synthetic construct
KTIGGHDSPHKSGQNQQI

SEQ ID NO: 3745 - protein, 18 aa, synthetic construct
KTDPQHDSPHKSGQNQQT

SEQ ID NO: 3746 - protein, 18 aa, synthetic construct
KTINRHDSPHKIVQNQQT

SEQ ID NO: 3747 - protein, 18 aa, synthetic construct
KTEQYHDSPHKSGQNQQT

SEQ ID NO: 3748 - protein, 18 aa, synthetic construct
KTINGHDSPHKSVQSKQT

SEQ ID NO: 3749 - protein, 18 aa, synthetic construct
KELVGHDSPHKSGQNQQT

SEQ ID NO: 3750 - protein, 18 aa, synthetic construct
KTENRHDSPHKSGQNQQT

SEQ ID NO: 3751 - protein, 18 aa, synthetic construct
KELMGHDSPHKSGQNQQT

SEQ ID NO: 3752 - protein, 18 aa, synthetic construct
KTINGNDSPHKIGHNQQT

SEQ ID NO: 3753 - protein, 18 aa, synthetic construct
KTEGHHDSPHKSGQNQQT

SEQ ID NO: 3754 - protein, 18 aa, synthetic construct
KTEGYHDSPHKSGQNQQT

SEQ ID NO: 3755 - protein, 18 aa, synthetic construct
KTVNGHDSPHKSGQTQQI

SEQ ID NO: 3756 - protein, 18 aa, synthetic construct
KTINGQDSPHKSGQNPLT

SEQ ID NO: 3757 - protein, 18 aa, synthetic construct
KTINGHDSPHKSGRDQKT

SEQ ID NO: 3758 - protein, 18 aa, synthetic construct
KTINGHDSPHKSVHNQQN

SEQ ID NO: 3759 - protein, 18 aa, synthetic construct
KTINGHDSPHKSGQWKRT

SEQ ID NO: 3760 - protein, 18 aa, synthetic construct
KNEIGHDSPHKSGQNQQT

SEQ ID NO: 3761 - protein, 18 aa, synthetic construct
KAINGHDSPHKSGQSQQI

SEQ ID NO: 3762 - protein, 18 aa, synthetic construct
KIINGHDSPHKSRQAQQT

SEQ ID NO: 3763 - protein, 18 aa, synthetic construct
KTPNGHDSPHKSGQNQQI

SEQ ID NO: 3764 - protein, 18 aa, synthetic construct
KITNGHDSPHKSGQTQQT

SEQ ID NO: 3765 - protein, 18 aa, synthetic construct
KTINGHDSPHKSVQNHQI

SEQ ID NO: 3766 - protein, 18 aa, synthetic construct
KTINGHDSPHKSKQNQQA

SEQ ID NO: 3767 - protein, 18 aa, synthetic construct
KTINGHDSPHKSAQNQLN

SEQ ID NO: 3768 - protein, 18 aa, synthetic construct
KTDITHDSPHKSGQNQQT

SEQ ID NO: 3769 - protein, 18 aa, synthetic construct
KTVNGHDSPHKSGQTQPT

SEQ ID NO: 3770 - protein, 18 aa, synthetic construct
KTEKFHDSPHKSGQNQQT

SEQ ID NO: 3771 - protein, 18 aa, synthetic construct
KTDQGHDSPHKSGQNQQT

SEQ ID NO: 3772 - protein, 18 aa, synthetic construct
KTINGHDSPHKLWINQQT

SEQ ID NO: 3773 - protein, 18 aa, synthetic construct
KGINGPDSPHKSGQNQQT

SEQ ID NO: 3774 - protein, 18 aa, synthetic construct
KSEIGHDSPHKSGQNQQT

SEQ ID NO: 3775 - protein, 18 aa, synthetic construct
KTINGHDSPHKSVQKQLT

SEQ ID NO: 3776 - protein, 18 aa, synthetic construct
KTVNGHDSPHKSGRNQLA

SEQ ID NO: 3777 - protein, 18 aa, synthetic construct
KTNNVHDSPHKSGQNQQS

SEQ ID NO: 3778 - protein, 18 aa, synthetic construct
KSEKGHDSPHKSGQNQQT

SEQ ID NO: 3779 - protein, 18 aa, synthetic construct
KWSAGHDSPHKSGQNQQT

SEQ ID NO: 3780 - protein, 18 aa, synthetic construct
KELAGHDSPHKSGQNQQT

SEQ ID NO: 3781 - protein, 18 aa, synthetic construct
KTINGHDSPHKMGRNQQS

SEQ ID NO: 3782 - protein, 18 aa, synthetic construct
KTDQAHDSPHKSGQNQQT

SEQ ID NO: 3783 - protein, 18 aa, synthetic construct
KTETQHDSPHKSGQNQQT

SEQ ID NO: 3784 - protein, 18 aa, synthetic construct
KTEMTHDSPHKSGQNQQT

SEQ ID NO: 3785 - protein, 18 aa, synthetic construct
KTINGHDSPHKSGISIQT

SEQ ID NO: 3786 - protein, 18 aa, synthetic construct
KTDAVHDSPHKSGQNQQT

SEQ ID NO: 3787 - protein, 18 aa, synthetic construct
KTSNGHDSPHKSVQNLQT

SEQ ID NO: 3788 - protein, 18 aa, synthetic construct
KTEKYHDSPHKSGQNQQT

SEQ ID NO: 3789 - protein, 18 aa, synthetic construct
KQTQGHDSPHKSGQNQQT

SEQ ID NO: 3790 - protein, 18 aa, synthetic construct
KTINGHDSPHKMAHNQQT

SEQ ID NO: 3791 - protein, 18 aa, synthetic construct
KTINGHDSPHKHGQNQQN

SEQ ID NO: 3792 - protein, 18 aa, synthetic construct
KGADGHDSPHKSGQNQQT

SEQ ID NO: 3793 - protein, 18 aa, synthetic construct
KVGEGHDSPHKSGQNQQT

SEQ ID NO: 3794 - protein, 18 aa, synthetic construct
KANEGHDSPHKSGQNQQT

SEQ ID NO: 3795 - protein, 18 aa, synthetic construct
KTDTMHDSPHKSGQNQQT

SEQ ID NO: 3796 - protein, 18 aa, synthetic construct
KTINGHDSPHKSVQSQQS

SEQ ID NO: 3797 - protein, 18 aa, synthetic construct
KTCIAHDSPHKSGQNQQT

SEQ ID NO: 3798 - protein, 18 aa, synthetic construct
KTINGHDSPHKSGQTVCT

SEQ ID NO: 3799 - protein, 18 aa, synthetic construct
KELRGHDSPHKSGQNQQT

SEQ ID NO: 3800 - protein, 18 aa, synthetic construct
KCQIGHDSPHKSGQNQQT

SEQ ID NO: 3801 - protein, 18 aa, synthetic construct
KGVMGHDSPHKSGQNQQT

SEQ ID NO: 3802 - protein, 18 aa, synthetic construct
KACDGHDSPHKSGQNQQT

SEQ ID NO: 3803 - protein, 18 aa, synthetic construct
KTINGQDSPHKSGQYQQI

SEQ ID NO: 3804 - protein, 18 aa, synthetic construct
KTINGHDSPHKSGQQIMT

SEQ ID NO: 3805 - protein, 18 aa, synthetic construct
KTINGHDSPHKSRQNEQS

SEQ ID NO: 3806 - protein, 18 aa, synthetic construct
KASNGHDSPHKSGLNHQT

SEQ ID NO: 3807 - protein, 18 aa, synthetic construct
KTVNGHDSPHKSGQSQPT

SEQ ID NO: 3808 - protein, 18 aa, synthetic construct
KNELGHDSPHKSGQNQQT

SEQ ID NO: 3809 - protein, 18 aa, synthetic construct
KTETFHDSPHKSGQNQQT

SEQ ID NO: 3810 - protein, 18 aa, synthetic construct
KAAEGHDSPHKSGQNQQT

SEQ ID NO: 3811 - protein, 18 aa, synthetic construct
KGQNGHDSPHKSGQNQQT

SEQ ID NO: 3812 - protein, 18 aa, synthetic construct
KNEFGHDSPHKSGQNQQT

SEQ ID NO: 3813 - protein, 18 aa, synthetic construct
KTSIGYDSPHKSGQNQQT

SEQ ID NO: 3814 - protein, 18 aa, synthetic construct
KTDNGHDSPHKSGQNLQT

SEQ ID NO: 3815 - protein, 18 aa, synthetic construct
KTEGQHDSPHKSGQNQQT

SEQ ID NO: 3816 - protein, 18 aa, synthetic construct
KTITGHDSPHKSRQDQQT

SEQ ID NO: 3817 - protein, 18 aa, synthetic construct
KAEHGHDSPHKSGQNQQT

SEQ ID NO: 3818 - protein, 18 aa, synthetic construct
KTINGDDSPHKSGQKQLT

SEQ ID NO: 3819 - protein, 18 aa, synthetic construct
KCDQGHDSPHKSGQNQQT

SEQ ID NO: 3820 - protein, 18 aa, synthetic construct
KEILGHDSPHKSGQNQQT

SEQ ID NO: 3821 - protein, 18 aa, synthetic construct
KTERNHDSPHKSGQNQQT

SEQ ID NO: 3822 - protein, 18 aa, synthetic construct
KAINGDDSPHKSGHNQQT

SEQ ID NO: 3823 - protein, 18 aa, synthetic construct
KTSNGHNSPHKSGQNQET

SEQ ID NO: 3824 - protein, 18 aa, synthetic construct
KTINGHDSPHKSGQMIHT

SEQ ID NO: 3825 - protein, 18 aa, synthetic construct
KNAIGHDSPHKSGQNQQT

SEQ ID NO: 3826 - protein, 18 aa, synthetic construct
KTDKFHDSPHKSGQNQQT

SEQ ID NO: 3827 - protein, 18 aa, synthetic construct
KTEGFHDSPHKSGQNQQT

SEQ ID NO: 3828 - protein, 18 aa, synthetic construct
KVINGHDSPHKSGRNHQS

SEQ ID NO: 3829 - protein, 18 aa, synthetic construct
KTITGHDSPHKSVQNRQT

SEQ ID NO: 3830 - protein, 18 aa, synthetic construct
KTPDMHDSPHKSGQNQQT

SEQ ID NO: 3831 - protein, 18 aa, synthetic construct
KTINGHDSPHKSGQKMNT

SEQ ID NO: 3832 - protein, 18 aa, synthetic construct
KTELQHDSPHKSGQNQQT

SEQ ID NO: 3833 - protein, 18 aa, synthetic construct
KTIHGHDSPHKSGQSQQN

SEQ ID NO: 3834 - protein, 18 aa, synthetic construct
KTEIGHDSPHKSGQNQQT

SEQ ID NO: 3835 - protein, 18 aa, synthetic construct
KTINGHDSPHKSGQYQHA

SEQ ID NO: 3836 - protein, 18 aa, synthetic construct
KTELYHDSPHKSGQNQQT

SEQ ID NO: 3837 - protein, 18 aa, synthetic construct
KTINGRGSPHKRGQNQQT

SEQ ID NO: 3838 - protein, 18 aa, synthetic construct
KTINGHGSPHSKAQNPQT

SEQ ID NO: 3839 - protein, 18 aa, synthetic construct
KTFNGSASPHSKALNQQT

SEQ ID NO: 3840 - protein, 18 aa, synthetic construct
KTINGCGSPHASGQNQQT

SEQ ID NO: 3841 - protein, 18 aa, synthetic construct
KTINGNGSPHSKAQNHQA

SEQ ID NO: 3842 - protein, 18 aa, synthetic construct
KTINGMGSPHSKTQNQQT

SEQ ID NO: 3843 - protein, 18 aa, synthetic construct
KTVNGTGSPHSKAQNQLT

SEQ ID NO: 3844 - protein, 18 aa, synthetic construct
KTIHGNGSPHSKAQNQET

SEQ ID NO: 3845 - protein, 18 aa, synthetic construct
KAINGNGSPHKRGQNQQT

SEQ ID NO: 3846 - protein, 18 aa, synthetic construct
KTINGNGSPHSKAPNLQT

SEQ ID NO: 3847 - protein, 18 aa, synthetic construct
KTIKGGGSPHSKAQDQQT

SEQ ID NO: 3848 - protein, 18 aa, synthetic construct
KTINGHPSPHWKGQNQQT

SEQ ID NO: 3849 - protein, 18 aa, synthetic construct
KTINGSGSPHIVWQNQQT

SEQ ID NO: 3850 - protein, 18 aa, synthetic construct
KTINGSGSPHSKYFMQQT

SEQ ID NO: 3851 - protein, 18 aa, synthetic construct
KTINGSGSPHSKARQRQT

SEQ ID NO: 3852 - protein, 18 aa, synthetic construct
KTINGSGSPHSCHQNQQT

SEQ ID NO: 3853 - protein, 18 aa, synthetic construct
KTINGSGSPHFPWQNQQT

SEQ ID NO: 3854 - protein, 18 aa, synthetic construct
KTINGSGSPHSKIRRQQT

SEQ ID NO: 3855 - protein, 18 aa, synthetic construct
KTINGSGSPHVYYQNQQT

SEQ ID NO: 3856 - protein, 18 aa, synthetic construct
KTINGSGSPHSLYWNQQT

SEQ ID NO: 3857 - protein, 18 aa, synthetic construct
KTINGSGSPHSKPKRQQT

SEQ ID NO: 3858 - protein, 18 aa, synthetic construct
KPRWGSGSPHSKAQNQQT

SEQ ID NO: 3859 - protein, 18 aa, synthetic construct
KTINGSGSPHSKAFSWQT

SEQ ID NO: 3860 - protein, 18 aa, synthetic construct
KTINGSGSPHSRFWNQQT

SEQ ID NO: 3861 - protein, 18 aa, synthetic construct
KTINGSGSPHSKAQCLKT

SEQ ID NO: 3862 - protein, 18 aa, synthetic construct
KTINGSGSPHSRMRNQQT

SEQ ID NO: 3863 - protein, 18 aa, synthetic construct
KTINGSGSPHSVKKNQQT

SEQ ID NO: 3864 - protein, 18 aa, synthetic construct
KTINGSGSPHSWAPNQQT

SEQ ID NO: 3865 - protein, 18 aa, synthetic construct
KTINGSGSPHSLWKNQQT

SEQ ID NO: 3866 - protein, 18 aa, synthetic construct
KTINGSGSPHSKARWQQT

SEQ ID NO: 3867 - protein, 18 aa, synthetic construct
KTINGSGSPHSFRPNQQT

SEQ ID NO: 3868 - protein, 18 aa, synthetic construct
KTINGSGSPHSKKVFQQT

SEQ ID NO: 3869 - protein, 18 aa, synthetic construct
KTINGSGSPHSYAFNQQT

SEQ ID NO: 3870 - protein, 18 aa, synthetic construct
KTINGSGSPHSKACSRQT

SEQ ID NO: 3871 - protein, 18 aa, synthetic construct
KYSAGSGSPHSKAQNQQT

SEQ ID NO: 3872 - protein, 18 aa, synthetic construct
KTINGSGSPHSKRLWQQT

SEQ ID NO: 3873 - protein, 18 aa, synthetic construct
KTINGSGSPHSCSRNQQT

SEQ ID NO: 3874 - protein, 18 aa, synthetic construct
KTINGSGSPHSRCPNQQT

SEQ ID NO: 3875 - protein, 18 aa, synthetic construct
KTINGSGSPHSGACNQQT

SEQ ID NO: 3876 - protein, 18 aa, synthetic construct
KYYTGSGSPHSKAQNQQT

SEQ ID NO: 3877 - protein, 18 aa, synthetic construct
KTINGSGSPHSKFRQQQT

SEQ ID NO: 3878 - protein, 18 aa, synthetic construct
KTINGSGSPHSFPFNQQT

SEQ ID NO: 3879 - protein, 18 aa, synthetic construct
KTINGSGSPHSFFGNQQT

SEQ ID NO: 3880 - protein, 18 aa, synthetic construct
KTINGSGSPHSMCQNQQT

SEQ ID NO: 3881 - protein, 18 aa, synthetic construct
KTINGSGSPHSKLFWQQT

SEQ ID NO: 3882 - protein, 18 aa, synthetic construct
KTINGSGSPHSKTRKQQT

SEQ ID NO: 3883 - protein, 18 aa, synthetic construct
KTINGSGSPHSGKRNQQT

SEQ ID NO: 3884 - protein, 18 aa, synthetic construct
KTINGSGSPHSKAQNFKR

SEQ ID NO: 3885 - protein, 18 aa, synthetic construct
KTINGSGSPHFYRQNQQT

SEQ ID NO: 3886 - protein, 18 aa, synthetic construct
KTINGSGSPHCRVQNQQT

SEQ ID NO: 3887 - protein, 18 aa, synthetic construct
KTINGSGSPHYGIQNQQT

SEQ ID NO: 3888 - protein, 18 aa, synthetic construct
KTINGSGSPHSKAQRFKT

SEQ ID NO: 3889 - protein, 18 aa, synthetic construct
KTINGSGSPHVNCQNQQT

SEQ ID NO: 3890 - protein, 18 aa, synthetic construct
KTINGSGSPHSKPFRQQT

SEQ ID NO: 3891 - protein, 18 aa, synthetic construct
KTINGSGSPHSLAWNQQT

SEQ ID NO: 3892 - protein, 18 aa, synthetic construct
KTINGSGSPHSKRSYQQT

SEQ ID NO: 3893 - protein, 18 aa, synthetic construct
KTINGSGSPHWSYQNQQT

SEQ ID NO: 3894 - protein, 18 aa, synthetic construct
KTINGSGSPHRWLQNQQT

SEQ ID NO: 3895 - protein, 18 aa, synthetic construct
KTINGSGSPHPSCQNQQT

SEQ ID NO: 3896 - protein, 18 aa, synthetic construct
KTINGSGSPHSSWLNQQT

SEQ ID NO: 3897 - protein, 18 aa, synthetic construct
KPRFGSGSPHSKAQNQQT

SEQ ID NO: 3898 - protein, 18 aa, synthetic construct
KWLTGSGSPHSKAQNQQT

SEQ ID NO: 3899 - protein, 18 aa, synthetic construct
KTINGSGSPHSKRRAQQT

SEQ ID NO: 3900 - protein, 18 aa, synthetic construct
KTINGSGSPHSKAQTCRT

SEQ ID NO: 3901 - protein, 18 aa, synthetic construct
KTINGSGSPHSKGCTQQT

SEQ ID NO: 3902 - protein, 18 aa, synthetic construct
KTINGSGSPHVPWQNQQT

SEQ ID NO: 3903 - protein, 18 aa, synthetic construct
KTINGSGSPHSKRYTQQT

SEQ ID NO: 3904 - protein, 18 aa, synthetic construct
KTINGSGSPHSGCQNQQT

SEQ ID NO: 3905 - protein, 18 aa, synthetic construct
KTINGSGSPHSFTPNQQT

SEQ ID NO: 3906 - protein, 18 aa, synthetic construct
KTINGSGSPHSTTCNQQT

SEQ ID NO: 3907 - protein, 18 aa, synthetic construct
KTINGSGSPHSKARMYQT

SEQ ID NO: 3908 - protein, 18 aa, synthetic construct
KTINGSGSPHPKRQNQQT

SEQ ID NO: 3909 - protein, 18 aa, synthetic construct
KTINGSGSPHSKCFLQQT

SEQ ID NO: 3910 - protein, 18 aa, synthetic construct
KTINGSGSPHWVPQNQQT

SEQ ID NO: 3911 - protein, 18 aa, synthetic construct
KTINGSGSPHSFWSNQQT

SEQ ID NO: 3912 - protein, 18 aa, synthetic construct
KRSYGSGSPHSKAQNQQT

SEQ ID NO: 3913 - protein, 18 aa, synthetic construct
KYVFGSGSPHSKAQNQQT

SEQ ID NO: 3914 - protein, 18 aa, synthetic construct
KTINGSGSPHSKFKNQQT

SEQ ID NO: 3915 - protein, 18 aa, synthetic construct
KTINGSGSPHRIKQNQQT

SEQ ID NO: 3916 - protein, 18 aa, synthetic construct
KTINGSGSPHSKAPRRQT

SEQ ID NO: 3917 - protein, 18 aa, synthetic construct
KTINGSGSPHSFRYNQQT

SEQ ID NO: 3918 - protein, 18 aa, synthetic construct
KTINGSGSPHSKMICQQT

SEQ ID NO: 3919 - protein, 18 aa, synthetic construct
KTINGSGSPHLRWQNQQT

SEQ ID NO: 3920 - protein, 18 aa, synthetic construct
KTINGSGSPHLPTQNQQT

SEQ ID NO: 3921 - protein, 18 aa, synthetic construct
KTINGSGSPHSKWKSQQT

SEQ ID NO: 3922 - protein, 18 aa, synthetic construct
KTINGSGSPHSYMRNQQT

SEQ ID NO: 3923 - protein, 18 aa, synthetic construct
KTINGSGSPHSKAARRQT

SEQ ID NO: 3924 - protein, 18 aa, synthetic construct
KTINGSGSPHLLCQNQQT

SEQ ID NO: 3925 - protein, 18 aa, synthetic construct
KTINGSGSPHRCCQNQQT

SEQ ID NO: 3926 - protein, 18 aa, synthetic construct
KTINGSGSPHLCVQNQQT

SEQ ID NO: 3927 - protein, 18 aa, synthetic construct
KTINGSGSPHSKLTRQQT

SEQ ID NO: 3928 - protein, 18 aa, synthetic construct
KTINGSGSPHSKLCTQQT

SEQ ID NO: 3929 - protein, 18 aa, synthetic construct
KKHLGSGSPHSKAQNQQT

SEQ ID NO: 3930 - protein, 18 aa, synthetic construct
KTINGSGSPHSKIRGQQT

SEQ ID NO: 3931 - protein, 18 aa, synthetic construct
KTINGSGSPHSYLVNQQT

SEQ ID NO: 3932 - protein, 18 aa, synthetic construct
KTINGSGSPHQGCQNQQT

SEQ ID NO: 3933 - protein, 18 aa, synthetic construct
KTINGSGSPHMAFQNQQT

SEQ ID NO: 3934 - protein, 18 aa, synthetic construct
KTINGSGSPHSKACQFQT

SEQ ID NO: 3935 - protein, 18 aa, synthetic construct
KTINGSGSPHSKWGLQQT

SEQ ID NO: 3936 - protein, 18 aa, synthetic construct
KTINGSGSPHSKILRQQT

SEQ ID NO: 3937 - protein, 18 aa, synthetic construct
KTINGSGSPHSFQINQQT

SEQ ID NO: 3938 - protein, 18 aa, synthetic construct
KTINGSGSPHSKACISQT

SEQ ID NO: 3939 - protein, 18 aa, synthetic construct
KTINGSGSPHSKAQTHRT

SEQ ID NO: 3940 - protein, 18 aa, synthetic construct
KTINGSGSPHSKALRCQT

SEQ ID NO: 3941 - protein, 18 aa, synthetic construct
KTINGSGSPHSKAFYIQT

SEQ ID NO: 3942 - protein, 18 aa, synthetic construct
KTINGSGSPHSKAHARQT

SEQ ID NO: 3943 - protein, 18 aa, synthetic construct
KTINGSGSPHSLCLNQQT

SEQ ID NO: 3944 - protein, 18 aa, synthetic construct
KTINGSGSPHSKAFVRQT

SEQ ID NO: 3945 - protein, 18 aa, synthetic construct
KPPLGSGSPHSKAQNQQT

SEQ ID NO: 3946 - protein, 18 aa, synthetic construct
KTINGSGSPHRPWQNQQT

SEQ ID NO: 3947 - protein, 18 aa, synthetic construct
KPARGSGSPHSKAQNQQT

SEQ ID NO: 3948 - protein, 18 aa, synthetic construct
KTINGSGSPHRPRQNQQT

SEQ ID NO: 3949 - protein, 18 aa, synthetic construct
KTINGSGSPHSCPQNQQT

SEQ ID NO: 3950 - protein, 18 aa, synthetic construct
KTINGSGSPHSKAQFILT

SEQ ID NO: 3951 - protein, 18 aa, synthetic construct
KTINGSGSPHSVRYNQQT

SEQ ID NO: 3952 - protein, 18 aa, synthetic construct
KSRRGSGSPHSKAQNQQT

SEQ ID NO: 3953 - protein, 18 aa, synthetic construct
KTINGSGSPHSVRCNQQT

SEQ ID NO: 3954 - protein, 18 aa, synthetic construct
KFFHGSGSPHSKAQNQQT

SEQ ID NO: 3955 - protein, 18 aa, synthetic construct
KTINGSGSPHSKMPCQQT

SEQ ID NO: 3956 - protein, 18 aa, synthetic construct
KTINGSGSPHSKKTSQQT

SEQ ID NO: 3957 - protein, 18 aa, synthetic construct
KRYNGSGSPHSKAQNQQT

SEQ ID NO: 3958 - protein, 18 aa, synthetic construct
KTINGSGSPHSLPYNQQT

SEQ ID NO: 3959 - protein, 18 aa, synthetic construct
KTINGSGSPHVYHQNQQT

SEQ ID NO: 3960 - protein, 18 aa, synthetic construct
KTINGSGSPHSKAQSRKT

SEQ ID NO: 3961 - protein, 18 aa, synthetic construct
KTINGSGSPHSYTRNQQT

SEQ ID NO: 3962 - protein, 18 aa, synthetic construct
KTINGSGSPHLVYQNQQT

SEQ ID NO: 3963 - protein, 18 aa, synthetic construct
KTINGSGSPHSKALRWQT

SEQ ID NO: 3964 - protein, 18 aa, synthetic construct
KTINGSGSPHYRYQNQQT

SEQ ID NO: 3965 - protein, 18 aa, synthetic construct
KTINGSGSPHSWLKNQQT

SEQ ID NO: 3966 - protein, 18 aa, synthetic construct
KTINGSGSPHSKAQMQIT

SEQ ID NO: 3967 - protein, 18 aa, synthetic construct
KTINGSGSPHCPAQNQQT

SEQ ID NO: 3968 - protein, 18 aa, synthetic construct
KTINGSGSPHSMCTNQQT

SEQ ID NO: 3969 - protein, 18 aa, synthetic construct
KTINGSGSPHSPPDNQQT

SEQ ID NO: 3970 - protein, 18 aa, synthetic construct
KTINGSGSPHSKRNYQQT

SEQ ID NO: 3971 - protein, 18 aa, synthetic construct
KTINGSGSPHRWTQNQQT

SEQ ID NO: 3972 - protein, 18 aa, synthetic construct
KTINGSGSPHSKACRLQT

SEQ ID NO: 3973 - protein, 18 aa, synthetic construct
KTINGSGSPHPRKQNQQT

SEQ ID NO: 3974 - protein, 18 aa, synthetic construct
KTINGSGSPHSKCSVQQT

SEQ ID NO: 3975 - protein, 18 aa, synthetic construct
KTINGSGSPHSKAQYVRT

SEQ ID NO: 3976 - protein, 18 aa, synthetic construct
KTINGSGSPHSKARISQT

SEQ ID NO: 3977 - protein, 18 aa, synthetic construct
KTINGSGSPHPFVQNQQT

SEQ ID NO: 3978 - protein, 18 aa, synthetic construct
KTINGSGSPHSKLPKQQT

SEQ ID NO: 3979 - protein, 18 aa, synthetic construct
KTINGSGSPHSKSEQQQT

SEQ ID NO: 3980 - protein, 18 aa, synthetic construct
KTINGSGSPHWVAQNQQT

SEQ ID NO: 3981 - protein, 18 aa, synthetic construct
KTINGSGSPHSLYQNQQT

SEQ ID NO: 3982 - protein, 18 aa, synthetic construct
KTINGSGSPHSKVRMQQT

SEQ ID NO: 3983 - protein, 18 aa, synthetic construct
KTINYTRSPHSKAQNQQT

SEQ ID NO: 3984 - protein, 18 aa, synthetic construct
KTINGSGSPHSSCTNQQT

SEQ ID NO: 3985 - protein, 18 aa, synthetic construct
KTINGSGSPHSKNSRQQT

SEQ ID NO: 3986 - protein, 18 aa, synthetic construct
KTINGSGSPHSKRKRQQT

SEQ ID NO: 3987 - protein, 18 aa, synthetic construct
KTINGSGSPHLCTQNQQT

SEQ ID NO: 3988 - protein, 18 aa, synthetic construct
KTINGSGSPHSKAQSAKT

SEQ ID NO: 3989 - protein, 18 aa, synthetic construct
KTINGSGSPHSTCLNQQT

SEQ ID NO: 3990 - protein, 18 aa, synthetic construct
KTINGSGSPHSYARNQQT

SEQ ID NO: 3991 - protein, 18 aa, synthetic construct
KTINGSGSPHSKQRPQQT

SEQ ID NO: 3992 - protein, 18 aa, synthetic construct
KTINGSGSPHSKRVVQQT

SEQ ID NO: 3993 - protein, 18 aa, synthetic construct
KRFSGSGSPHSKAQNQQT

SEQ ID NO: 3994 - protein, 18 aa, synthetic construct
KTINGSGSPHKSGQNPQT

SEQ ID NO: 3995 - protein, 18 aa, synthetic construct
KTINGSGSPHSKALRHQT

SEQ ID NO: 3996 - protein, 18 aa, synthetic construct
KTINGSGSPHSYYSNQQT

SEQ ID NO: 3997 - protein, 18 aa, synthetic construct
KTINGSGSPHSLTCNQQT

SEQ ID NO: 3998 - protein, 18 aa, synthetic construct
KTINGSGSPHSCQSNQQT

SEQ ID NO: 3999 - protein, 18 aa, synthetic construct
KTINGSGSPHSKAQSIKT

SEQ ID NO: 4000 - protein, 18 aa, synthetic construct
KYSMGSGSPHSKAQNQQT

SEQ ID NO: 4001 - protein, 18 aa, synthetic construct
KTINGSGSPHSKAKGWQT

SEQ ID NO: 4002 - protein, 18 aa, synthetic construct
KTIVGSGSPHSKPQNQQT

SEQ ID NO: 4003 - protein, 18 aa, synthetic construct
KTINGSGSPHFPFQNQQT

SEQ ID NO: 4004 - protein, 18 aa, synthetic construct
KPFLGSGSPHSKAQNQQT

SEQ ID NO: 4005 - protein, 18 aa, synthetic construct
KTINGSGSPHSKCTSQQT

SEQ ID NO: 4006 - protein, 18 aa, synthetic construct
KTINGSGSPHSVFENQQT

SEQ ID NO: 4007 - protein, 18 aa, synthetic construct
KTINGSGSPHSKAKKVQT

SEQ ID NO: 4008 - protein, 18 aa, synthetic construct
KTINGSGSPHSKAQRCST

SEQ ID NO: 4009 - protein, 18 aa, synthetic construct
KTINGSGSPHSKAQFCLT

SEQ ID NO: 4010 - protein, 18 aa, synthetic construct
KTINGSGSPHGRYQNQQT

SEQ ID NO: 4011 - protein, 18 aa, synthetic construct
KTQRKSGSPHSKAQNQQT

SEQ ID NO: 4012 - protein, 18 aa, synthetic construct
KTINGSYSPHCLAQNQQT

SEQ ID NO: 4013 - protein, 18 aa, synthetic construct
KTINGSLSPHFWAQNQQT

SEQ ID NO: 4014 - protein, 18 aa, synthetic construct
KTINHRISPHSKAQNQQT

SEQ ID NO: 4015 - protein, 18 aa, synthetic construct
KTRRPSGSPHSKAQNQQT

SEQ ID NO: 4016 - protein, 18 aa, synthetic construct
KTINGAYSPHRKAQNQQT

SEQ ID NO: 4017 - protein, 18 aa, synthetic construct
KTINGRRSPHGKAQNQQT

SEQ ID NO: 4018 - protein, 18 aa, synthetic construct
KTINGRTSPHRKAQNQQT

SEQ ID NO: 4019 - protein, 18 aa, synthetic construct
KTINGSRSPHAWAQNQQT

SEQ ID NO: 4020 - protein, 18 aa, synthetic construct
KTINKCLSPHSKAQNQQT

SEQ ID NO: 4021 - protein, 18 aa, synthetic construct
KTINGSSSPHRCAQNQQT

SEQ ID NO: 4022 - protein, 18 aa, synthetic construct
KTINCRTSPHSKAQNQQT

SEQ ID NO: 4023 - protein, 18 aa, synthetic construct
KTIFDCGSPHSKAQNQQT

SEQ ID NO: 4024 - protein, 18 aa, synthetic construct
KTINSPRSPHSKAQNQQT

SEQ ID NO: 4025 - protein, 18 aa, synthetic construct
KTINGLDSPHRSRQNQQT

SEQ ID NO: 4026 - protein, 18 aa, synthetic construct
KTRTRSGSPHSKAQNQQT

SEQ ID NO: 4027 - protein, 18 aa, synthetic construct
KTINGSISPHCPAQNQQT

SEQ ID NO: 4028 - protein, 18 aa, synthetic construct
KTINGLVSPHRKAQNQQT

SEQ ID NO: 4029 - protein, 18 aa, synthetic construct
KTINALRSPHSKAQNQQT

SEQ ID NO: 4030 - protein, 18 aa, synthetic construct
KTICGRGSPHSKAQNQQT

SEQ ID NO: 4031 - protein, 18 aa, synthetic construct
KTTRKSGSPHSKAQNQQT

SEQ ID NO: 4032 - protein, 18 aa, synthetic construct
KTMQRSGSPHSKAQNQQT

SEQ ID NO: 4033 - protein, 18 aa, synthetic construct
KTINGSSSPHWMAQNQQT

SEQ ID NO: 4034 - protein, 18 aa, synthetic construct
KTRKRSGSPHSKAQNQQT

SEQ ID NO: 4035 - protein, 18 aa, synthetic construct
KTINFTRSPHSKAQNQQT

SEQ ID NO: 4036 - protein, 18 aa, synthetic construct
KTINNLRSPHSKAQNQQT

SEQ ID NO: 4037 - protein, 18 aa, synthetic construct
KTINGRPSPHGKAQNQQT

SEQ ID NO: 4038 - protein, 18 aa, synthetic construct
KTINWSRSPHSKAQNQQT

SEQ ID NO: 4039 - protein, 18 aa, synthetic construct
KTINGTRSPHKKAQNQQT

SEQ ID NO: 4040 - protein, 18 aa, synthetic construct
KTINGSVSPHCTAQNQQT

SEQ ID NO: 4041 - protein, 18 aa, synthetic construct
KTTRCSGSPHSKAQNQQT

SEQ ID NO: 4042 - protein, 18 aa, synthetic construct
KTKLCSGSPHSKAQNQQT

SEQ ID NO: 4043 - protein, 18 aa, synthetic construct
KTINLGCSPHSKAQNQQT

SEQ ID NO: 4044 - protein, 18 aa, synthetic construct
KTISGHDSPHISGQYQQT

SEQ ID NO: 4045 - protein, 18 aa, synthetic construct
KTINGRRSPHMKAQNQQT

SEQ ID NO: 4046 - protein, 18 aa, synthetic construct
KTINGPWSPHRKAQNQQT

SEQ ID NO: 4047 - protein, 18 aa, synthetic construct
KTINSCFSPHSKAQNQQT

SEQ ID NO: 4048 - protein, 18 aa, synthetic construct
KTIKRYGSPHSKAQNQQT

SEQ ID NO: 4049 - protein, 18 aa, synthetic construct
KTINRYSSPHSKAQNQQT

SEQ ID NO: 4050 - protein, 18 aa, synthetic construct
KTTGRSGSPHSKAQNQQT

SEQ ID NO: 4051 - protein, 18 aa, synthetic construct
KTINRQFSPHSKAQNQQT

SEQ ID NO: 4052 - protein, 18 aa, synthetic construct
KTITGHDSPHSKAQNQQT

SEQ ID NO: 4053 - protein, 18 aa, synthetic construct
KTINGSGSPHKSGQYQQT

SEQ ID NO: 4054 - protein, 18 aa, synthetic construct
KTINGSGSPHKSGQDQQT

SEQ ID NO: 4055 - protein, 18 aa, synthetic construct
KTINGSGSPHKSGQIQQT

SEQ ID NO: 4056 - protein, 18 aa, synthetic construct
KTINGSGSPHKSGRNQQT

SEQ ID NO: 4057 - protein, 18 aa, synthetic construct
KTINGSGSPHKSGKNQQT

SEQ ID NO: 4058 - protein, 18 aa, synthetic construct
KTIYGHDSPHSKAQNQQT

SEQ ID NO: 4059 - protein, 18 aa, synthetic construct
KTINGSGSPHKSGQNQQS

SEQ ID NO: 4060 - protein, 18 aa, synthetic construct
KTINGSGSPHKSGQNLQT

SEQ ID NO: 4061 - protein, 18 aa, synthetic construct
KAINGHDSPHSKAQNQQT

SEQ ID NO: 4062 - protein, 18 aa, synthetic construct
KTVNGHDSPHSKAQNQQT

SEQ ID NO: 4063 - protein, 18 aa, synthetic construct
KTIKGHDSPHSKAQNQQT

SEQ ID NO: 4064 - protein, 18 aa, synthetic construct
KSINGHDSPHSKAQNQQT

SEQ ID NO: 4065 - protein, 18 aa, synthetic construct
KTINGSGSPHKSGQTQQT

SEQ ID NO: 4066 - protein, 18 aa, synthetic construct
KTINGSGSPHKSGHNQQT

SEQ ID NO: 4067 - protein, 18 aa, synthetic construct
KTFNGHDSPHSKAQNQQT

SEQ ID NO: 4068 - protein, 18 aa, synthetic construct
KTINGSGSPHKSGLNQQT

SEQ ID NO: 4069 - protein, 18 aa, synthetic construct
KTINGHDSPHSKALNQQT

SEQ ID NO: 4070 - protein, 18 aa, synthetic construct
KTINGSGSPHKSGQNQLT

SEQ ID NO: 4071 - protein, 18 aa, synthetic construct
KTLNGHDSPHSKAQNQQT

SEQ ID NO: 4072 - protein, 18 aa, synthetic construct
KTINGSGSPHKSGQNQHT

SEQ ID NO: 4073 - protein, 18 aa, synthetic construct
KTIDGHDSPHSKAQNQQT

SEQ ID NO: 4074 - protein, 18 aa, synthetic construct
KTNNGHDSPHSKAQNQQT

SEQ ID NO: 4075 - protein, 18 aa, synthetic construct
KTINGSGSPHKSGQKQQT

SEQ ID NO: 4076 - protein, 18 aa, synthetic construct
KTINGSGSPHKSGQNRQT

SEQ ID NO: 4077 - protein, 18 aa, synthetic construct
KTINGSGSPHKSGQNQQN

SEQ ID NO: 4078 - protein, 18 aa, synthetic construct
KTINGSGSPHKSGQNQQA

SEQ ID NO: 4079 - protein, 18 aa, synthetic construct
KTINGHDSPHSKAHNQQT

SEQ ID NO: 4080 - protein, 18 aa, synthetic construct
KTINGHDSPHSKAQNQQT

SEQ ID NO: 4081 - protein, 18 aa, synthetic construct
KTINGSGSPHKSGQNQQP

SEQ ID NO: 4082 - protein, 18 aa, synthetic construct
KTINGHDSPHCKAQNQQT

SEQ ID NO: 4083 - protein, 18 aa, synthetic construct
KTINGHDSPHSKAQNQQS

SEQ ID NO: 4084 - protein, 18 aa, synthetic construct
KTINGSGSPHKSGQNQQT

SEQ ID NO: 4085 - protein, 18 aa, synthetic construct
KTINGHDSPDKSGQNQQT

SEQ ID NO: 4086 - protein, 18 aa, synthetic construct
KPINGHDSPHKSGQNHQS

SEQ ID NO: 4087 - protein, 18 aa, synthetic construct
KTSNGSGSPHKSGQNQQT

SEQ ID NO: 4088 - protein, 18 aa, synthetic construct
KTVNGSGSPHKSGQNQQT

SEQ ID NO: 4089 - protein, 18 aa, synthetic construct
KTINGHDSTHKSGHNQQT

SEQ ID NO: 4090 - protein, 18 aa, synthetic construct
KTINGHDSPHSKAQNQQN

SEQ ID NO: 4091 - protein, 18 aa, synthetic construct
KTIYGSGSPHKSGQNQQT

SEQ ID NO: 4092 - protein, 18 aa, synthetic construct
KTINGLDSQHKSGQNQQT

SEQ ID NO: 4093-4094 - skipped (2 entries)

SEQ ID NO: 4095 - protein, 18 aa, synthetic construct
KTIIGHDSPHSKAQNQQT

SEQ ID NO: 4096 - protein, 18 aa, synthetic construct
KTSNGHDSPHSKAQNQQT

SEQ ID NO: 4097 - protein, 18 aa, synthetic construct
KTINGSGSPHSKAQNRRR

SEQ ID NO: 4098 - protein, 18 aa, synthetic construct
KTISKRGSPHSKAQNQQT

SEQ ID NO: 4099 - protein, 18 aa, synthetic construct
KGLGGSGSPHSKAQNQQT

SEQ ID NO: 4100 - protein, 18 aa, synthetic construct
KTINGHDSPHSKAQNLQT

SEQ ID NO: 4101 - protein, 18 aa, synthetic construct
KTINGHDSPHSKAQNQQI

SEQ ID NO: 4102 - protein, 18 aa, synthetic construct
KTINGSGSPHFTRQNQQT

SEQ ID NO: 4103 - protein, 18 aa, synthetic construct
KTINGSGSPHSLPWNQQT

SEQ ID NO: 4104 - protein, 18 aa, synthetic construct
KTINGHDSPHSKAQNHQT

SEQ ID NO: 4105 - protein, 18 aa, synthetic construct
KTMNGHDSPHSKAQNQQT

SEQ ID NO: 4106 - protein, 18 aa, synthetic construct
KPYKGSGSPHSKAQNQQT

SEQ ID NO: 4107 - protein, 18 aa, synthetic construct
KRLWGSGSPHSKAQNQQT

SEQ ID NO: 4108 - protein, 18 aa, synthetic construct
KRMRGSGSPHSKAQNQQT

SEQ ID NO: 4109 - protein, 18 aa, synthetic construct
KRTYGSGSPHSKAQNQQT

SEQ ID NO: 4110 - protein, 18 aa, synthetic construct
KTINCLRSPHSKAQNQQT

SEQ ID NO: 4111 - protein, 18 aa, synthetic construct
KTINFSRSPHSKAQNQQT

SEQ ID NO: 4112 - protein, 18 aa, synthetic construct
KTINGLRSPHFKAQNQQT

SEQ ID NO: 4113 - protein, 18 aa, synthetic construct
KTINGNRSPHNKAQNQQT

SEQ ID NO: 4114 - protein, 18 aa, synthetic construct
KTINGPRSPHYKAQNQQT

SEQ ID NO: 4115 - protein, 18 aa, synthetic construct
KTINGQASPHWKAQNQQT

SEQ ID NO: 4116 - protein, 18 aa, synthetic construct
KTINGRCSPHSKAQNQQT

SEQ ID NO: 4117 - protein, 18 aa, synthetic construct
KTINGRHSPHSKAQNQQT

SEQ ID NO: 4118 - protein, 18 aa, synthetic construct
KTINGRKSPHRKAQNQQT

SEQ ID NO: 4119 - protein, 18 aa, synthetic construct
KTINGRLSPHWKAQNQQT

SEQ ID NO: 4120 - protein, 18 aa, synthetic construct
KTINGRLSPHYKAQNQQT

SEQ ID NO: 4121 - protein, 18 aa, synthetic construct
KTINGRPSPHMKAQNQQT

SEQ ID NO: 4122 - protein, 18 aa, synthetic construct
KTINGRSSPHWKAQNQQT

SEQ ID NO: 4123 - protein, 18 aa, synthetic construct
KTINGRWSPHSKAQNQQT

SEQ ID NO: 4124 - protein, 18 aa, synthetic construct
KTINGSGSPHAPCQNQQT

SEQ ID NO: 4125 - protein, 18 aa, synthetic construct
KTINGSGSPHAWAQNQQT

SEQ ID NO: 4126 - protein, 18 aa, synthetic construct
KTINGSGSPHCMRQNQQT

SEQ ID NO: 4127 - protein, 18 aa, synthetic construct
KTINGSGSPHFCSQNQQT

SEQ ID NO: 4128 - protein, 18 aa, synthetic construct
KTINGSGSPHFLFQNQQT

SEQ ID NO: 4129 - protein, 18 aa, synthetic construct
KTINGSGSPHFWAQNQQT

SEQ ID NO: 4130 - protein, 18 aa, synthetic construct
KTINGSGSPHLCAQNQQT

SEQ ID NO: 4131 - protein, 18 aa, synthetic construct
KTINGSGSPHLRYQNQQT

SEQ ID NO: 4132 - protein, 18 aa, synthetic construct
KTINGSGSPHLYYQNQQT

SEQ ID NO: 4133 - protein, 18 aa, synthetic construct
KTINGSGSPHPLCQNQQT

SEQ ID NO: 4134 - protein, 18 aa, synthetic construct
KTINGSGSPHRIRQNQQT

SEQ ID NO: 4135 - protein, 18 aa, synthetic construct
KTINGSGSPHRLFQNQQT

SEQ ID NO: 4136 - protein, 18 aa, synthetic construct
KTINGSGSPHSCGQNQQT

SEQ ID NO: 4137 - protein, 18 aa, synthetic construct
KTINGSGSPHSCLRNQQT

SEQ ID NO: 4138 - protein, 18 aa, synthetic construct
KTINGSGSPHSCLSNQQT

SEQ ID NO: 4139 - protein, 18 aa, synthetic construct
KTINGSGSPHSCRLNQQT

SEQ ID NO: 4140 - protein, 18 aa, synthetic construct
KTINGSGSPHSCSLNQQT

SEQ ID NO: 4141 - protein, 18 aa, synthetic construct
KTINGSGSPHSKACTLQT

SEQ ID NO: 4142 - protein, 18 aa, synthetic construct
KTINGSGSPHSKAFRAQT

SEQ ID NO: 4143 - protein, 18 aa, synthetic construct
KTINGSGSPHSKAIRKQT

SEQ ID NO: 4144 - protein, 18 aa, synthetic construct
KTINGSGSPHSKAQASRT

SEQ ID NO: 4145 - protein, 18 aa, synthetic construct
KTINGSGSPHSKAQFELT

SEQ ID NO: 4146 - protein, 18 aa, synthetic construct
KTINGSGSPHSKAQIVIT

SEQ ID NO: 4147 - protein, 18 aa, synthetic construct
KTINGSGSPHSKAQLART

SEQ ID NO: 4148 - protein, 18 aa, synthetic construct
KTINGSGSPHSKAQLQRT

SEQ ID NO: 4149 - protein, 18 aa, synthetic construct
KTINGSGSPHSKAQNARR

SEQ ID NO: 4150 - protein, 18 aa, synthetic construct
KTINGSGSPHSKAQNCPR

SEQ ID NO: 4151 - protein, 18 aa, synthetic construct
KTINGSGSPHSKAQNMRR

SEQ ID NO: 4152 - protein, 18 aa, synthetic construct
KTINGSGSPHSKAQNRRV

SEQ ID NO: 4153 - protein, 18 aa, synthetic construct
KTINGSGSPHSKAQPSRT

SEQ ID NO: 4154 - protein, 18 aa, synthetic construct
KTINGSGSPHSKAQQVKT

SEQ ID NO: 4155 - protein, 18 aa, synthetic construct
KTINGSGSPHSKAQQVRT

SEQ ID NO: 4156 - protein, 18 aa, synthetic construct
KTINGSGSPHSKAQRLKT

SEQ ID NO: 4157 - protein, 18 aa, synthetic construct
KTINGSGSPHSKAQRRAT

SEQ ID NO: 4158 - protein, 18 aa, synthetic construct
KTINGSGSPHSKAQRRGT

SEQ ID NO: 4159 - protein, 18 aa, synthetic construct
KTINGSGSPHSKAQRRRT

SEQ ID NO: 4160 - protein, 18 aa, synthetic construct
KTINGSGSPHSKAQRTRT

SEQ ID NO: 4161 - protein, 18 aa, synthetic construct
KTINGSGSPHSKAQRVHT

SEQ ID NO: 4162 - protein, 18 aa, synthetic construct
KTINGSGSPHSKAQTYRT

SEQ ID NO: 4163 - protein, 18 aa, synthetic construct
KTINGSGSPHSKAQVRKT

SEQ ID NO: 4164 - protein, 18 aa, synthetic construct
KTINGSGSPHSKARGRQT

SEQ ID NO: 4165 - protein, 18 aa, synthetic construct
KTINGSGSPHSKARLCQT

SEQ ID NO: 4166 - protein, 18 aa, synthetic construct
KTINGSGSPHSKARLKQT

SEQ ID NO: 4167 - protein, 18 aa, synthetic construct
KTINGSGSPHSKARNSQT

SEQ ID NO: 4168 - protein, 18 aa, synthetic construct
KTINGSGSPHSKARWVQT

SEQ ID NO: 4169 - protein, 18 aa, synthetic construct
KTINGSGSPHSKAVRWQT

SEQ ID NO: 4170 - protein, 18 aa, synthetic construct
KTINGSGSPHSKAYTRQT

SEQ ID NO: 4171 - protein, 18 aa, synthetic construct
KTINGSGSPHSKCQSQQT

SEQ ID NO: 4172 - protein, 18 aa, synthetic construct
KTINGSGSPHSKFLRQQT

SEQ ID NO: 4173 - protein, 18 aa, synthetic construct
KTINGSGSPHSKFRFQQT

SEQ ID NO: 4174 - protein, 18 aa, synthetic construct
KTINGSGSPHSKFRLQQT

SEQ ID NO: 4175 - protein, 18 aa, synthetic construct
KTINGSGSPHSKFRRQQT

SEQ ID NO: 4176 - protein, 18 aa, synthetic construct
KTINGSGSPHSKGMKQQT

SEQ ID NO: 4177 - protein, 18 aa, synthetic construct
KTINGSGSPHSKKLRQQT

SEQ ID NO: 4178 - protein, 18 aa, synthetic construct
KTINGSGSPHSKKRPQQT

SEQ ID NO: 4179 - protein, 18 aa, synthetic construct
KTINGSGSPHSKKSRQQT

SEQ ID NO: 4180 - protein, 18 aa, synthetic construct
KTINGSGSPHSKLYRQQT

SEQ ID NO: 4181 - protein, 18 aa, synthetic construct
KTINGSGSPHSKLYWQQT

SEQ ID NO: 4182 - protein, 18 aa, synthetic construct
KTINGSGSPHSKPRMQQT

SEQ ID NO: 4183 - protein, 18 aa, synthetic construct
KTINGSGSPHSKRFPQQT

SEQ ID NO: 4184 - protein, 18 aa, synthetic construct
KTINGSGSPHSKRFRQQT

SEQ ID NO: 4185 - protein, 18 aa, synthetic construct
KTINGSGSPHSKRPYQQT

SEQ ID NO: 4186 - protein, 18 aa, synthetic construct
KTINGSGSPHSKRRMQQT

SEQ ID NO: 4187 - protein, 18 aa, synthetic construct
KTINGSGSPHSKRSKQQT

SEQ ID NO: 4188 - protein, 18 aa, synthetic construct
KTINGSGSPHSKRSRQQT

SEQ ID NO: 4189 - protein, 18 aa, synthetic construct
KTINGSGSPHSKRTMQQT

SEQ ID NO: 4190 - protein, 18 aa, synthetic construct
KTINGSGSPHSKRTRQQT

SEQ ID NO: 4191 - protein, 18 aa, synthetic construct
KTINGSGSPHSKRVRQQT

SEQ ID NO: 4192 - protein, 18 aa, synthetic construct
KTINGSGSPHSKRYIQQT

SEQ ID NO: 4193 - protein, 18 aa, synthetic construct
KTINGSGSPHSKRYNQQT

SEQ ID NO: 4194 - protein, 18 aa, synthetic construct
KTINGSGSPHSKRYPQQT

SEQ ID NO: 4195 - protein, 18 aa, synthetic construct
KTINGSGSPHSKRYSQQT

SEQ ID NO: 4196 - protein, 18 aa, synthetic construct
KTINGSGSPHSKTCIQQT

SEQ ID NO: 4197 - protein, 18 aa, synthetic construct
KTINGSGSPHSKWLTQQT

SEQ ID NO: 4198 - protein, 18 aa, synthetic construct
KTINGSGSPHSKWVVQQT

SEQ ID NO: 4199 - protein, 18 aa, synthetic construct
KTINGSGSPHSKYRLQQT

SEQ ID NO: 4200 - protein, 18 aa, synthetic construct
KTINGSGSPHSKYSKQQT

SEQ ID NO: 4201 - protein, 18 aa, synthetic construct
KTINGSGSPHSKYSRQQT

SEQ ID NO: 4202 - protein, 18 aa, synthetic construct
KTINGSGSPHSLKRNQQT

SEQ ID NO: 4203 - protein, 18 aa, synthetic construct
KTINGSGSPHSLWFNQQT

SEQ ID NO: 4204 - protein, 18 aa, synthetic construct
KTINGSGSPHSLWPNQQT

SEQ ID NO: 4205 - protein, 18 aa, synthetic construct
KTINGSGSPHSLWTNQQT

SEQ ID NO: 4206 - protein, 18 aa, synthetic construct
KTINGSGSPHSMRRNQQT

SEQ ID NO: 4207 - protein, 18 aa, synthetic construct
KTINGSGSPHSPCLNQQT

SEQ ID NO: 4208 - protein, 18 aa, synthetic construct
KTINGSGSPHSQWQNQQT

SEQ ID NO: 4209 - protein, 18 aa, synthetic construct
KTINGSGSPHSRCANQQT

SEQ ID NO: 4210 - protein, 18 aa, synthetic construct
KTINGSGSPHSRIRNQQT

SEQ ID NO: 4211 - protein, 18 aa, synthetic construct
KTINGSGSPHSRKSNQQT

SEQ ID NO: 4212 - protein, 18 aa, synthetic construct
KTINGSGSPHSRLWNQQT

SEQ ID NO: 4213 - protein, 18 aa, synthetic construct
KTINGSGSPHSRRFNQQT

SEQ ID NO: 4214 - protein, 18 aa, synthetic construct
KTINGSGSPHSRRPNQQT

SEQ ID NO: 4215 - protein, 18 aa, synthetic construct
KTINGSGSPHSRSCNQQT

SEQ ID NO: 4216 - protein, 18 aa, synthetic construct
KTINGSGSPHSRSKNQQT

SEQ ID NO: 4217 - protein, 18 aa, synthetic construct
KTINGSGSPHSRTKNQQT

SEQ ID NO: 4218 - protein, 18 aa, synthetic construct
KTINGSGSPHSRWLNQQT

SEQ ID NO: 4219 - protein, 18 aa, synthetic construct
KTINGSGSPHSSVCNQQT

SEQ ID NO: 4220 - protein, 18 aa, synthetic construct
KTINGSGSPHSSWRNQQT

SEQ ID NO: 4221 - protein, 18 aa, synthetic construct
KTINGSGSPHSVCQNQQT

SEQ ID NO: 4222 - protein, 18 aa, synthetic construct
KTINGSGSPHSVLCNQQT

SEQ ID NO: 4223 - protein, 18 aa, synthetic construct
KTINGSGSPHSVRRNQQT

SEQ ID NO: 4224 - protein, 18 aa, synthetic construct
KTINGSGSPHSVSCNQQT

SEQ ID NO: 4225 - protein, 18 aa, synthetic construct
KTINGSGSPHSWALNQQT

SEQ ID NO: 4226 - protein, 18 aa, synthetic construct
KTINGSGSPHSWITNQQT

SEQ ID NO: 4227 - protein, 18 aa, synthetic construct
KTINGSGSPHSWPMNQQT

SEQ ID NO: 4228 - protein, 18 aa, synthetic construct
KTINGSGSPHSWRSNQQT

SEQ ID NO: 4229 - protein, 18 aa, synthetic construct
KTINGSGSPHSYFLNQQT

SEQ ID NO: 4230 - protein, 18 aa, synthetic construct
KTINGSGSPHSYTYNQQT

SEQ ID NO: 4231 - protein, 18 aa, synthetic construct
KTINGSGSPHSYWQNQQT

SEQ ID NO: 4232 - protein, 18 aa, synthetic construct
KTINGSGSPHTLCQNQQT

SEQ ID NO: 4233 - protein, 18 aa, synthetic construct
KTINGSGSPHWLRQNQQT

SEQ ID NO: 4234 - protein, 18 aa, synthetic construct
KTINGSGSPHWPSQNQQT

SEQ ID NO: 4235 - protein, 18 aa, synthetic construct
KTINGSGSPHYLRQNQQT

SEQ ID NO: 4236 - protein, 18 aa, synthetic construct
KTINGSGSPHYTRQNQQT

SEQ ID NO: 4237 - protein, 18 aa, synthetic construct
KTINGSLSPHLWAQNQQT

SEQ ID NO: 4238 - protein, 18 aa, synthetic construct
KTINGSPSPHCQAQNQQT

SEQ ID NO: 4239 - protein, 18 aa, synthetic construct
KTINGSRSPHLCAQNQQT

SEQ ID NO: 4240 - protein, 18 aa, synthetic construct
KTINGSRSPHWRAQNQQT

SEQ ID NO: 4241 - protein, 18 aa, synthetic construct
KTINGSVSPHWLAQNQQT

SEQ ID NO: 4242 - protein, 18 aa, synthetic construct
KTINGTFSPHRKAQNQQT

SEQ ID NO: 4243 - protein, 18 aa, synthetic construct
KTINGWTSPHRKAQNQQT

SEQ ID NO: 4244 - protein, 18 aa, synthetic construct
KTINRGISPHSKAQNQQT

SEQ ID NO: 4245 - protein, 18 aa, synthetic construct
KTINTVRSPHSKAQNQQT

SEQ ID NO: 4246 - protein, 18 aa, synthetic construct
KTKLRSGSPHSKAQNQQT

SEQ ID NO: 4247 - protein, 18 aa, synthetic construct
KTRLRSGSPHSKAQNQQT

SEQ ID NO: 4248 - protein, 18 aa, synthetic construct
KWLLGSGSPHSKAQNQQT

SEQ ID NO: 4249 - protein, 18 aa, synthetic construct
KWSQGSGSPHSKAQNQQT

SEQ ID NO: 4250 - protein, 18 aa, synthetic construct
KWYLGSGSPHSKAQNQQT

SEQ ID NO: 4251 - protein, 18 aa, synthetic construct
KYHSGSGSPHSKAQNQQT

SEQ ID NO: 4252 - protein, 18 aa, synthetic construct
KYLPGSGSPHSKAQNQQT

SEQ ID NO: 4253 - protein, 18 aa, synthetic construct
KAINGGGSPHSKTQNQQT

SEQ ID NO: 4254 - protein, 18 aa, synthetic construct
KAINGHDSPHKRSPNQQT

SEQ ID NO: 4255 - protein, 18 aa, synthetic construct
KAINGHDSPHKSFSPQQT

SEQ ID NO: 4256 - protein, 18 aa, synthetic construct
KAINGHDSPHKSGENQQP

SEQ ID NO: 4257 - protein, 18 aa, synthetic construct
KAINGHDSPHKSGQLART

SEQ ID NO: 4258 - protein, 18 aa, synthetic construct
KAINGHDSPHKSGQNAFL

SEQ ID NO: 4259 - protein, 18 aa, synthetic construct
KAINGHDSPHKSGQNAYT

SEQ ID NO: 4260 - protein, 18 aa, synthetic construct
KAINGHDSPHKSGQNFAS

SEQ ID NO: 4261 - protein, 18 aa, synthetic construct
KAINGHDSPHKSGQNLAS

SEQ ID NO: 4262 - protein, 18 aa, synthetic construct
KAINGHDSPHKSGQNLGS

SEQ ID NO: 4263 - protein, 18 aa, synthetic construct
KAINGHDSPHKSGQNLKF

SEQ ID NO: 4264 - protein, 18 aa, synthetic construct
KAINGHDSPHKSGQNLLK

SEQ ID NO: 4265 - protein, 18 aa, synthetic construct
KAINGHDSPHKSGQNLSR

SEQ ID NO: 4266 - protein, 18 aa, synthetic construct
KAINGHDSPHKSGQNLSS

SEQ ID NO: 4267 - protein, 18 aa, synthetic construct
KAINGHDSPHKSGQNSLG

SEQ ID NO: 4268 - protein, 18 aa, synthetic construct
KAINGHDSPHKSGQNTLQ

SEQ ID NO: 4269 - protein, 18 aa, synthetic construct
KAINGHDSPHKSGQNTSL

SEQ ID NO: 4270 - protein, 18 aa, synthetic construct
KAINGHDSPHKSGQRLGT

SEQ ID NO: 4271 - protein, 18 aa, synthetic construct
KAINGHDSPHKSGQRNYT

SEQ ID NO: 4272 - protein, 18 aa, synthetic construct
KAINGHDSPHKSGQRPST

SEQ ID NO: 4273 - protein, 18 aa, synthetic construct
KAINGHDSPHKSGQRPVT

SEQ ID NO: 4274 - protein, 18 aa, synthetic construct
KAINGHDSPHKSGQVPST

SEQ ID NO: 4275 - protein, 18 aa, synthetic construct
KAINGHDSPHKSLSNQQT

SEQ ID NO: 4276 - protein, 18 aa, synthetic construct
KAINGHDSPHKSVLSQQT

SEQ ID NO: 4277 - protein, 18 aa, synthetic construct
KAINGHDSPHKTLQNQQT

SEQ ID NO: 4278 - protein, 18 aa, synthetic construct
KAINGHNSPHSKAQNQQT

SEQ ID NO: 4279 - protein, 18 aa, synthetic construct
KAINGLDSPHSKAQNQQT

SEQ ID NO: 4280 - protein, 18 aa, synthetic construct
KAINGSGSPHKSGQNQQT

SEQ ID NO: 4281 - protein, 18 aa, synthetic construct
KAINGSGSPHSKAQGQQT

SEQ ID NO: 4282 - protein, 18 aa, synthetic construct
KAINGSGSPHSKAQLSGT

SEQ ID NO: 4283 - protein, 18 aa, synthetic construct
KAINGSGSPHSKAQNGSL

SEQ ID NO: 4284 - protein, 18 aa, synthetic construct
KAINGSGSPHSKAQNSLL

SEQ ID NO: 4285 - protein, 18 aa, synthetic construct
KAINGSGSPHSKAVGLQT

SEQ ID NO: 4286 - protein, 18 aa, synthetic construct
KAINGSGSPHSKSLLQQT

SEQ ID NO: 4287 - protein, 18 aa, synthetic construct
KAINGSGSPHSKSLPQQT

SEQ ID NO: 4288 - protein, 18 aa, synthetic construct
KAINGSGSPHSKSTFQQT

SEQ ID NO: 4289 - protein, 18 aa, synthetic construct
KAITGHDSPHSKAQNQQT

SEQ ID NO: 4290 - protein, 18 aa, synthetic construct
KDVMGSGSPHSKAQNQQT

SEQ ID NO: 4291 - protein, 18 aa, synthetic construct
KEIVGSGSPHSKAQNQQT

SEQ ID NO: 4292 - protein, 18 aa, synthetic construct
KEIYGSGSPHSKAQNQQT

SEQ ID NO: 4293 - protein, 18 aa, synthetic construct
KELSGSGSPHSKAQNQQT

SEQ ID NO: 4294 - protein, 18 aa, synthetic construct
KETIGSGSPHSKAQNQQT

SEQ ID NO: 4295 - protein, 18 aa, synthetic construct
KEVLGSGSPHSKAQNQQT

SEQ ID NO: 4296 - protein, 18 aa, synthetic construct
KFALGHDSPHKSGQKQQT

SEQ ID NO: 4297 - protein, 18 aa, synthetic construct
KIINGHDSPHKSGQNLVL

SEQ ID NO: 4298 - protein, 18 aa, synthetic construct
KIINGHDSPHKSGQRNYT

SEQ ID NO: 4299 - protein, 18 aa, synthetic construct
KIINGHDSPHSKAQNQQT

SEQ ID NO: 4300 - protein, 18 aa, synthetic construct
KLNPGHDSPHKSGQTQQT

SEQ ID NO: 4301 - protein, 18 aa, synthetic construct
KLNRGHDSPHKSGQNQQS

SEQ ID NO: 4302 - protein, 18 aa, synthetic construct
KLSSGHDSPHKSGQNQQN

SEQ ID NO: 4303 - protein, 18 aa, synthetic construct
KNINGHDSPHSKAQNQQT

SEQ ID NO: 4304 - protein, 18 aa, synthetic construct
KNNDGSGSPHSKAQNQQT

SEQ ID NO: 4305 - protein, 18 aa, synthetic construct
KNVMGSGSPHSKAQNQQT

SEQ ID NO: 4306 - protein, 18 aa, synthetic construct
KPINGHDSPHKSGQNKLS

SEQ ID NO: 4307 - protein, 18 aa, synthetic construct
KPINGHDSPHKSGQNLSS

SEQ ID NO: 4308 - protein, 18 aa, synthetic construct
KPINGHDSPHSKAQNQQT

SEQ ID NO: 4309 - protein, 18 aa, synthetic construct
KRINGHDSPHSKAQNQQT

SEQ ID NO: 4310 - protein, 18 aa, synthetic construct
KSCSGHDSPHKSGQNQQS

SEQ ID NO: 4311 - protein, 18 aa, synthetic construct
KSINGHDSPHKSGQNLAS

SEQ ID NO: 4312 - protein, 18 aa, synthetic construct
KSINGHDSPHKSGQNLFL

SEQ ID NO: 4313 - protein, 18 aa, synthetic construct
KSINGHDSPHKSGQNLLM

SEQ ID NO: 4314 - protein, 18 aa, synthetic construct
KSINGHDSPHKSGQNLLQ

SEQ ID NO: 4315 - protein, 18 aa, synthetic construct
KSINGHDSPHKSGQNSLG

SEQ ID NO: 4316 - protein, 18 aa, synthetic construct
KSINGHDSPHKSGQNTLQ

SEQ ID NO: 4317 - protein, 18 aa, synthetic construct
KSINGHDSPHKSSSNQQT

SEQ ID NO: 4318 - protein, 18 aa, synthetic construct
KSINGHDSPHKYKLNQQT

SEQ ID NO: 4319 - protein, 18 aa, synthetic construct
KSINGSGSPHKSGQKQQT

SEQ ID NO: 4320 - protein, 18 aa, synthetic construct
KSINGSGSPHKSGQNQQT

SEQ ID NO: 4321 - protein, 18 aa, synthetic construct
KSINGSGSPHSKAQGLST

SEQ ID NO: 4322 - protein, 18 aa, synthetic construct
KSINGSGSPHSKAQLLGT

SEQ ID NO: 4323 - protein, 18 aa, synthetic construct
KSINGSGSPHSKTSWQQT

SEQ ID NO: 4324 - protein, 18 aa, synthetic construct
KSMNGHDSPHSKAQNQQT

SEQ ID NO: 4325 - protein, 18 aa, synthetic construct
KSTLGSGSPHSKAQNQHT

SEQ ID NO: 4326 - protein, 18 aa, synthetic construct
KSTLGSGSPHSKAQNQQN

SEQ ID NO: 4327 - protein, 18 aa, synthetic construct
KSTVGSGSPHSKAQTQQT

SEQ ID NO: 4328 - protein, 18 aa, synthetic construct
KTCKESGSPHSKAQNQQT

SEQ ID NO: 4329 - protein, 18 aa, synthetic construct
KTCKGSGSPHSKAQNQQT

SEQ ID NO: 4330 - protein, 18 aa, synthetic construct
KTCKSSGSPHSKAQNQQT

SEQ ID NO: 4331 - protein, 18 aa, synthetic construct
KTDMGSGSPHSKAQNQQT

SEQ ID NO: 4332 - protein, 18 aa, synthetic construct
KTDNGIGSPHSKAQNQQT

SEQ ID NO: 4333 - protein, 18 aa, synthetic construct
KTEGGSGSPHSKAQNQQT

SEQ ID NO: 4334 - protein, 18 aa, synthetic construct
KTEHHSGSPHSKAQNQQT

SEQ ID NO: 4335 - protein, 18 aa, synthetic construct
KTEKDSGSPHSKAQNQQT

SEQ ID NO: 4336 - protein, 18 aa, synthetic construct
KTELGHDSPHKRGQNQQT

SEQ ID NO: 4337 - protein, 18 aa, synthetic construct
KTESVSGSPHSKAQNQQT

SEQ ID NO: 4338 - protein, 18 aa, synthetic construct
KTETNSGSPHSKAQNQQT

SEQ ID NO: 4339 - protein, 18 aa, synthetic construct
KTETYSGSPHSKAQNQQT

SEQ ID NO: 4340 - protein, 18 aa, synthetic construct
KTEWLSGSPHSKAQNQQT

SEQ ID NO: 4341 - protein, 18 aa, synthetic construct
KTFNGSGSPHKSGQNQQT

SEQ ID NO: 4342 - protein, 18 aa, synthetic construct
KTGLRHDSPHKSGQKQQT

SEQ ID NO: 4343 - protein, 18 aa, synthetic construct
KTGLRHDSPHKSGQNQQS

SEQ ID NO: 4344 - protein, 18 aa, synthetic construct
KTGVTHDSPHKSGQKQQT

SEQ ID NO: 4345 - protein, 18 aa, synthetic construct
KTIDGHESPHSKAQNQQT

SEQ ID NO: 4346 - protein, 18 aa, synthetic construct
KTIEGHDSPHKSGQTQQT

SEQ ID NO: 4347 - protein, 18 aa, synthetic construct
KTIHGHDSPHSKAQNQQT

SEQ ID NO: 4348 - protein, 18 aa, synthetic construct
KTIHGHESPHSKAQNQQT

SEQ ID NO: 4349 - protein, 18 aa, synthetic construct
KTIIGHDSPHKSGQNRSS

SEQ ID NO: 4350 - protein, 18 aa, synthetic construct
KTIIGHDSPHKSGQRLGT

SEQ ID NO: 4351 - protein, 18 aa, synthetic construct
KTIIGSGSPHKSGQNQQT

SEQ ID NO: 4352 - protein, 18 aa, synthetic construct
KTIKGHDSPHKSGQNMLF

SEQ ID NO: 4353 - protein, 18 aa, synthetic construct
KTILGSGSPHSKAQNLQT

SEQ ID NO: 4354 - protein, 18 aa, synthetic construct
KTINGCSSPHWKAQNQQT

SEQ ID NO: 4355 - protein, 18 aa, synthetic construct
KTINGGGSTHSKAQNQQT

SEQ ID NO: 4356 - protein, 18 aa, synthetic construct
KTINGHDSPHKAGQSQQT

SEQ ID NO: 4357 - protein, 18 aa, synthetic construct
KTINGHDSPHKRGQNVPS

SEQ ID NO: 4358 - protein, 18 aa, synthetic construct
KTINGHDSPHKRGRSYQT

SEQ ID NO: 4359 - protein, 18 aa, synthetic construct
KTINGHDSPHKTGQNPPT

SEQ ID NO: 4360 - protein, 18 aa, synthetic construct
KTINGHDSPHSKAENQQT

SEQ ID NO: 4361 - protein, 18 aa, synthetic construct
KTINGHDSPHSKALSLQT

SEQ ID NO: 4362 - protein, 18 aa, synthetic construct
KTINGHDSPHSKAQGQQT

SEQ ID NO: 4363 - protein, 18 aa, synthetic construct
KTINGHDSPHSKAQHQQT

SEQ ID NO: 4364 - protein, 18 aa, synthetic construct
KTINGHDSPHSKAQIQQT

SEQ ID NO: 4365 - protein, 18 aa, synthetic construct
KTINGHDSPHSKAQKQQT

SEQ ID NO: 4366 - protein, 18 aa, synthetic construct
KTINGHDSPHSKAQNLSS

SEQ ID NO: 4367 - protein, 18 aa, synthetic construct
KTINGHDSPHSKAQNPQT

SEQ ID NO: 4368 - protein, 18 aa, synthetic construct
KTINGHDSPHSKAQNQET

SEQ ID NO: 4369 - protein, 18 aa, synthetic construct
KTINGHDSPHSKAQNQHT

SEQ ID NO: 4370 - protein, 18 aa, synthetic construct
KTINGHDSPHSKAQNQLT

SEQ ID NO: 4371 - protein, 18 aa, synthetic construct
KTINGHDSPHSKAQNQPT

SEQ ID NO: 4372 - protein, 18 aa, synthetic construct
KTINGHDSPHSKAQNQQA

SEQ ID NO: 4373 - protein, 18 aa, synthetic construct
KTINGHDSPHSKAQNTGS

SEQ ID NO: 4374 - protein, 18 aa, synthetic construct
KTINGHDSPHSKAQSQQT

SEQ ID NO: 4375 - protein, 18 aa, synthetic construct
KTINGHDSPHSKAQTQQT

SEQ ID NO: 4376 - protein, 18 aa, synthetic construct
KTINGHDSPHSKAQYQQT

SEQ ID NO: 4377 - protein, 18 aa, synthetic construct
KTINGHDSPHSKARNQQT

SEQ ID NO: 4378 - protein, 18 aa, synthetic construct
KTINGHDSPHSKLPGQQT

SEQ ID NO: 4379 - protein, 18 aa, synthetic construct
KTINGHDSPHSKSPNQQT

SEQ ID NO: 4380 - protein, 18 aa, synthetic construct
KTINGHESPHKSGQNAFL

SEQ ID NO: 4381 - protein, 18 aa, synthetic construct
KTINGIGSPHSKAPNEQT

SEQ ID NO: 4382 - protein, 18 aa, synthetic construct
KTINGQDSPHKSGQNLHM

SEQ ID NO: 4383 - protein, 18 aa, synthetic construct
KTINGRGSPHSKAQIGMT

SEQ ID NO: 4384 - protein, 18 aa, synthetic construct
KTINGRGSPHSKAQNQVL

SEQ ID NO: 4385 - protein, 18 aa, synthetic construct
KTINGRGSPHSKAQSPTT

SEQ ID NO: 4386 - protein, 18 aa, synthetic construct
KTINGRGSPHSKATSFQT

SEQ ID NO: 4387 - protein, 18 aa, synthetic construct
KTINGSGSPHFVVQNQQT

SEQ ID NO: 4388 - protein, 18 aa, synthetic construct
KTINGSGSPHKRGQKQQT

SEQ ID NO: 4389 - protein, 18 aa, synthetic construct
KTINGSGSPHKRGQNQET

SEQ ID NO: 4390 - protein, 18 aa, synthetic construct
KTINGSGSPHKRGQNQLT

SEQ ID NO: 4391 - protein, 18 aa, synthetic construct
KTINGSGSPHKRGRNQQT

SEQ ID NO: 4392 - protein, 18 aa, synthetic construct
KTINGSGSPHKSGGNQQT

SEQ ID NO: 4393 - protein, 18 aa, synthetic construct
KTINGSGSPHKSGHNQET

SEQ ID NO: 4394 - protein, 18 aa, synthetic construct
KTINGSGSPHKSGHNQLT

SEQ ID NO: 4395 - protein, 18 aa, synthetic construct
KTINGSGSPHKSGHNQQN

SEQ ID NO: 4396 - protein, 18 aa, synthetic construct
KTINGSGSPHKSGLNQLT

SEQ ID NO: 4397 - protein, 18 aa, synthetic construct
KTINGSGSPHKSGPNQQT

SEQ ID NO: 4398 - protein, 18 aa, synthetic construct
KTINGSGSPHKSGQGQQT

SEQ ID NO: 4399 - protein, 18 aa, synthetic construct
KTINGSGSPHKSGQHLQT

SEQ ID NO: 4400 - protein, 18 aa, synthetic construct
KTINGSGSPHKSGQHQQT

SEQ ID NO: 4401 - protein, 18 aa, synthetic construct
KTINGSGSPHKSGQKHQT

SEQ ID NO: 4402 - protein, 18 aa, synthetic construct
KTINGSGSPHKSGQKQQS

SEQ ID NO: 4403 - protein, 18 aa, synthetic construct
KTINGSGSPHKSGQNEQT

SEQ ID NO: 4404 - protein, 18 aa, synthetic construct
KTINGSGSPHKSGQNHQT

SEQ ID NO: 4405 - protein, 18 aa, synthetic construct
KTINGSGSPHKSGQNKQT

SEQ ID NO: 4406 - protein, 18 aa, synthetic construct
KTINGSGSPHKSGQNKTS

SEQ ID NO: 4407 - protein, 18 aa, synthetic construct
KTINGSGSPHKSGQNQEA

SEQ ID NO: 4408 - protein, 18 aa, synthetic construct
KTINGSGSPHKSGQNQET

SEQ ID NO: 4409 - protein, 18 aa, synthetic construct
KTINGSGSPHKSGQNQKT

SEQ ID NO: 4410 - protein, 18 aa, synthetic construct
KTINGSGSPHKSGQNQQI

SEQ ID NO: 4411 - protein, 18 aa, synthetic construct
KTINGSGSPHKSGQNQQR

SEQ ID NO: 4412 - protein, 18 aa, synthetic construct
KTINGSGSPHKSGQNQRT

SEQ ID NO: 4413 - protein, 18 aa, synthetic construct
KTINGSGSPHKSGQNQYT

SEQ ID NO: 4414 - protein, 18 aa, synthetic construct
KTINGSGSPHKSGQRQQT

SEQ ID NO: 4415 - protein, 18 aa, synthetic construct
KTINGSGSPHKSGQSQQT

SEQ ID NO: 4416 - protein, 18 aa, synthetic construct
KTINGSGSPHKSGQYQRT

SEQ ID NO: 4417 - protein, 18 aa, synthetic construct
KTINGSGSPHKSGRNQQA

SEQ ID NO: 4418 - protein, 18 aa, synthetic construct
KTINGSGSPHKSRHNQQT

SEQ ID NO: 4419 - protein, 18 aa, synthetic construct
KTINGSGSPHKSRQYQQT

SEQ ID NO: 4420 - protein, 18 aa, synthetic construct
KTINGSGSPHRKAQAPGT

SEQ ID NO: 4421 - protein, 18 aa, synthetic construct
KTINGSGSPHSKAAMKQT

SEQ ID NO: 4422 - protein, 18 aa, synthetic construct
KTINGSGSPHSKAGRQQT

SEQ ID NO: 4423 - protein, 18 aa, synthetic construct
KTINGSGSPHSKAGRTQT

SEQ ID NO: 4424 - protein, 18 aa, synthetic construct
KTINGSGSPHSKAKSNQT

SEQ ID NO: 4425 - protein, 18 aa, synthetic construct
KTINGSGSPHSKALKTQT

SEQ ID NO: 4426 - protein, 18 aa, synthetic construct
KTINGSGSPHSKAPRTQT

SEQ ID NO: 4427 - protein, 18 aa, synthetic construct
KTINGSGSPHSKAQAART

SEQ ID NO: 4428 - protein, 18 aa, synthetic construct
KTINGSGSPHSKAQAILT

SEQ ID NO: 4429 - protein, 18 aa, synthetic construct
KTINGSGSPHSKAQCRGT

SEQ ID NO: 4430 - protein, 18 aa, synthetic construct
KTINGSGSPHSKAQGLRT

SEQ ID NO: 4431 - protein, 18 aa, synthetic construct
KTINGSGSPHSKAQKGVL

SEQ ID NO: 4432 - protein, 18 aa, synthetic construct
KTINGSGSPHSKAQKSNT

SEQ ID NO: 4433 - protein, 18 aa, synthetic construct
KTINGSGSPHSKAQNNKF

SEQ ID NO: 4434 - protein, 18 aa, synthetic construct
KTINGSGSPHSKAQNRRT

SEQ ID NO: 4435 - protein, 18 aa, synthetic construct
KTINGSGSPHSKAQPKQT

SEQ ID NO: 4436 - protein, 18 aa, synthetic construct
KTINGSGSPHSKAQRAPT

SEQ ID NO: 4437 - protein, 18 aa, synthetic construct
KTINGSGSPHSKAQREHT

SEQ ID NO: 4438 - protein, 18 aa, synthetic construct
KTINGSGSPHSKAQRFGT

SEQ ID NO: 4439 - protein, 18 aa, synthetic construct
KTINGSGSPHSKAQRPCT

SEQ ID NO: 4440 - protein, 18 aa, synthetic construct
KTINGSGSPHSKAQRQAT

SEQ ID NO: 4441 - protein, 18 aa, synthetic construct
KTINGSGSPHSKAQRQPT

SEQ ID NO: 4442 - protein, 18 aa, synthetic construct
KTINGSGSPHSKAQTKLT

SEQ ID NO: 4443 - protein, 18 aa, synthetic construct
KTINGSGSPHSKAQTTHT

SEQ ID NO: 4444 - protein, 18 aa, synthetic construct
KTINGSGSPHSKAQVQRT

SEQ ID NO: 4445 - protein, 18 aa, synthetic construct
KTINGSGSPHSKAQVVRT

SEQ ID NO: 4446 - protein, 18 aa, synthetic construct
KTINGSGSPHSKAQWPNT

SEQ ID NO: 4447 - protein, 18 aa, synthetic construct
KTINGSGSPHSKAQYPST

SEQ ID NO: 4448 - protein, 18 aa, synthetic construct
KTINGSGSPHSKARALQT

SEQ ID NO: 4449 - protein, 18 aa, synthetic construct
KTINGSGSPHSKARDQHT

SEQ ID NO: 4450 - protein, 18 aa, synthetic construct
KTINGSGSPHSKARFQQT

SEQ ID NO: 4451 - protein, 18 aa, synthetic construct
KTINGSGSPHSKARRTQT

SEQ ID NO: 4452 - protein, 18 aa, synthetic construct
KTINGSGSPHSKARSLQT

SEQ ID NO: 4453 - protein, 18 aa, synthetic construct
KTINGSGSPHSKARVIQT

SEQ ID NO: 4454 - protein, 18 aa, synthetic construct
KTINGSGSPHSKAWYLQT

SEQ ID NO: 4455 - protein, 18 aa, synthetic construct
KTINGSGSPHSKGGGQQT

SEQ ID NO: 4456 - protein, 18 aa, synthetic construct
KTINGSGSPHSKGSRQQT

SEQ ID NO: 4457 - protein, 18 aa, synthetic construct
KTINGSGSPHSKLQRQQT

SEQ ID NO: 4458 - protein, 18 aa, synthetic construct
KTINGSGSPHSKMLRQQT

SEQ ID NO: 4459 - protein, 18 aa, synthetic construct
KTINGSGSPHSKSSIKQT

SEQ ID NO: 4460 - protein, 18 aa, synthetic construct
KTINGSGSPHSKVRFQQT

SEQ ID NO: 4461 - protein, 18 aa, synthetic construct
KTINGSGSPHSVVWNQQT

SEQ ID NO: 4462 - protein, 18 aa, synthetic construct
KTINGSTSPHKLAQNQQP

SEQ ID NO: 4463 - protein, 18 aa, synthetic construct
KTINRHDSPHKSGQRPST

SEQ ID NO: 4464 - protein, 18 aa, synthetic construct
KTINRIMSPHSKAQNQQT

SEQ ID NO: 4465 - protein, 18 aa, synthetic construct
KTINTARSPHSKAQNQQT

SEQ ID NO: 4466 - protein, 18 aa, synthetic construct
KTISGHDSPHSKAQNQQT

SEQ ID NO: 4467 - protein, 18 aa, synthetic construct
KTISGSGSPHKSGQNQQT

SEQ ID NO: 4468 - protein, 18 aa, synthetic construct
KTITGHDSPHKSGQRLGT

SEQ ID NO: 4469 - protein, 18 aa, synthetic construct
KTITGSGSPHKSGQNQQT

SEQ ID NO: 4470 - protein, 18 aa, synthetic construct
KTIYGHDSPHKSGQRLGT

SEQ ID NO: 4471 - protein, 18 aa, synthetic construct
KTLNGHDSPHKSGQNLFL

SEQ ID NO: 4472 - protein, 18 aa, synthetic construct
KTLNGHDSPHKSGQNLSS

SEQ ID NO: 4473 - protein, 18 aa, synthetic construct
KTLSFHDSPHKSGQNQQS

SEQ ID NO: 4474 - protein, 18 aa, synthetic construct
KTSNGSGSPHSKAQNTMT

SEQ ID NO: 4475 - protein, 18 aa, synthetic construct
KTTNGHDSPHSKAQNQQT

SEQ ID NO: 4476 - protein, 18 aa, synthetic construct
KTVNGGGSPHSKAQNQQT

SEQ ID NO: 4477 - protein, 18 aa, synthetic construct
KTVNGHDSPHKSGQNVSL

SEQ ID NO: 4478 - protein, 18 aa, synthetic construct
KTVNGHDSPHKSGQRPST

SEQ ID NO: 4479 - protein, 18 aa, synthetic construct
KTVNGHDSPHKSGQTQQA

SEQ ID NO: 4480 - protein, 18 aa, synthetic construct
KTVNGHESPHSKAQNQQT

SEQ ID NO: 4481 - protein, 18 aa, synthetic construct
KTVNGSGSPHSKAQGLST

SEQ ID NO: 4482 - protein, 18 aa, synthetic construct
KTVNGSGSPHSKAQNVTS

SEQ ID NO: 4483 - protein, 18 aa, synthetic construct
KTVPASGSPHSKAQNQQT

SEQ ID NO: 4484 - protein, 18 aa, synthetic construct
NTINGSGSPHSKAHNQQT

SEQ ID NO: 4485 - protein, 18 aa, synthetic construct
TTINGGGSPHSKAQNQQT

SEQ ID NO: 4486 - protein, 8 aa, synthetic construct
HDSPHSKA

SEQ ID NO: 4487 - protein, 8 aa, synthetic construct
GHDSPHKS

SEQ ID NO: 4488 - skipped

SEQ ID NO: 4489 - protein, 10 aa, synthetic construct
NGHDSPHKSG

SEQ ID NO: 4490 - protein, 12 aa, synthetic construct
INGHDSPHKSGQ

SEQ ID NO: 4491 - protein, 14 aa, synthetic construct
TINGHDSPHKSGQN

SEQ ID NO: 4492 - protein, 16 aa, synthetic construct
KTINGHDSPHKSGQNQ

SEQ ID NO: 4493 - protein, 8 aa, synthetic construct
GSPHSKAQ

SEQ ID NO: 4494 - protein, 10 aa, synthetic construct
SGSPHSKAQN

SEQ ID NO: 4495 - protein, 12 aa, synthetic construct
GSGSPHSKAQNQ

SEQ ID NO: 4496 - protein, 14 aa, synthetic construct
NGSGSPHSKAQNQQ

SEQ ID NO: 4497 - protein, 16 aa, synthetic construct
INGSGSPHSKAQNQQT

SEQ ID NO: 4498 - protein, 10 aa, synthetic construct
GSGSHDSPHK

SEQ ID NO: 4499 - protein, 12 aa, synthetic construct
GSGSGHDSPHKS

SEQ ID NO: 4500 - protein, 14 aa, synthetic construct
GSGSNGHDSPHKSG

SEQ ID NO: 4501 - protein, 16 aa, synthetic construct
GSGSINGHDSPHKSGQ

SEQ ID NO: 4502 - protein, 18 aa, synthetic construct
GSGSTINGHDSPHKSGQN

SEQ ID NO: 4503 - protein, 20 aa, synthetic construct
GSGSKTINGHDSPHKSGQNQ

SEQ ID NO: 4504 - protein, 14 aa, synthetic construct
GSGSKTINGSGQNQ

SEQ ID NO: 4505-4511 - skipped (7 entries)

SEQ ID NO: 4512 - protein, 14 aa, synthetic construct
  SITE 9: note = Phosphorylated residue
GSGSNGHDSPHKSG

SEQ ID NO: 4513 - protein, 20 aa, synthetic construct
  SITE 12: note = Phosphorylated residue
GSGSKTINGHDSPHKSGQNQ

SEQ ID NO: 4514 - protein, 29 aa, synthetic construct
  SITE 15: note = Phosphorylated residue
GSGSYLSKTINGHDSPHKSGQNQQTLKFS

SEQ ID NO: 4515 - protein, 10 aa, synthetic construct
  SITE 5: note = Phosphorylated residue
NGHDSPHKSG

SEQ ID NO: 4516 - protein, 16 aa, synthetic construct
  SITE 8: note = Phosphorylated residue
KTINGHDSPHKSGQNQ

SEQ ID NO: 4517 - protein, 25 aa, synthetic construct
  SITE 11: note = Phosphorylated residue
YLSKTINGHDSPHKSGQNQQTLKFS

SEQ ID NO: 4518 - protein, 26 aa, synthetic construct
LYYLSKTINGHDSPHKSGQNQQTLKF

SEQ ID NO: 4519 - protein, 46 aa, synthetic construct
RLMNPLIDQYLYYLSKTINGHDSPHKSGQNQQTLKFSVAGPSNMAV

SEQ ID NO: 4520-4672 - skipped (153 entries)

SEQ ID NO: 4673 - DNA, 23 bp, synthetic construct
  source 1..23: mol_type = other DNA
acaaacaccattgtcacactcca

SEQ ID NO: 4674 - DNA, 71 bp, synthetic construct
  source 1..71: mol_type = other DNA
acaaacaccattgtcacactccacacaaacaccattgtcacactccacacaaacaccattgtcacactcca

SEQ ID NO: 4675 - DNA, 23 bp, synthetic construct
  source 1..23: mol_type = other DNA
tccataaagtaggaaacactaca

SEQ ID NO: 4676 - DNA, 22 bp, synthetic construct
  source 1..22: mol_type = other DNA
agtgaattctaccagtgccata

SEQ ID NO: 4677 - DNA, 24 bp, synthetic construct
  source 1..24: mol_type = other DNA
agtgtgagttctaccattgccaaa

SEQ ID NO: 4678 - DNA, 23 bp, synthetic construct
  source 1..23: mol_type = other DNA
agcaaaaatgtgctagtgccaaa

SEQ ID NO: 4679 - DNA, 22 bp, synthetic construct
  source 1..22: mol_type = other DNA
atacatacttctttacattcca

SEQ ID NO: 4680 - protein, 7 aa, synthetic construct
TLAVPFK

SEQ ID NO: 4681 - protein, 18 aa, synthetic construct
KTINGSGSPHSKAQARKT

SEQ ID NO: 4682 - protein, 18 aa, synthetic construct
KYIVGSGSPHSKAQNQQT

SEQ ID NO: 4683 - protein, 18 aa, synthetic construct
KTINGSGSPHSMYMNQQT

SEQ ID NO: 4684 - protein, 18 aa, synthetic construct
KTINGSGSPHSKAFYRQT

SEQ ID NO: 4685 - protein, 18 aa, synthetic construct
KTINGSGSPHSKLKRQQT

SEQ ID NO: 4686 - protein, 18 aa, synthetic construct
KTINGSGSPHSKRHRQQT

SEQ ID NO: 4687 - protein, 18 aa, synthetic construct
KTINGSGSPHSKAQKCIT

SEQ ID NO: 4688 - protein, 18 aa, synthetic construct
KTINGSGSPHSKWRLQQT

SEQ ID NO: 4689 - protein, 18 aa, synthetic construct
KTINGSGSPHSRCRNQQT

SEQ ID NO: 4690 - protein, 18 aa, synthetic construct
KTINGSGSPHSFTCNQQT

SEQ ID NO: 4691 - protein, 18 aa, synthetic construct
KTINGSGSPHSKFFIQQT

SEQ ID NO: 4692 - protein, 18 aa, synthetic construct
KTINGSGSPHSKAQYSRT

SEQ ID NO: 4693 - protein, 18 aa, synthetic construct
KTINGSGSPHCALQNQQT

SEQ ID NO: 4694 - protein, 16 aa, synthetic construct
TLKFSVAGPSNMAVQG

SEQ ID NO: 4695 - protein, 6 aa, synthetic construct
GSGSPH

SEQ ID NO: 4696 - skipped

SEQ ID NO: 4697 - protein, 9 aa, synthetic construct
GSGSPHSKA

SEQ ID NO: 4698 - protein, 9 aa, synthetic construct
GHDSPHKSG

SEQ ID NO: 4699 - skipped

SEQ ID NO: 4700 - protein, 4 aa, synthetic construct
SPHS

SEQ ID NO: 4701 - protein, 5 aa, synthetic construct
SPHSK

SEQ ID NO: 4702 - protein, 4 aa, synthetic construct
HDSP

SEQ ID NO: 4703 - protein, 5 aa, synthetic construct
HDSPH

SEQ ID NO: 4704 - protein, 5 aa, synthetic construct
SPHKS

SEQ ID NO: 4705 - protein, 5 aa, synthetic construct
SPHAR

SEQ ID NO: 4706 - protein, 5 aa, synthetic construct
SPHVK

SEQ ID NO: 4707 - protein, 5 aa, synthetic construct
SPHAS

SEQ ID NO: 4708 - protein, 5 aa, synthetic construct
SPHKK

SEQ ID NO: 4709 - protein, 5 aa, synthetic construct
SPHVR

SEQ ID NO: 4710 - protein, 5 aa, synthetic construct
SPHRK

SEQ ID NO: 4711 - protein, 5 aa, synthetic construct
SPHKT

SEQ ID NO: 4712 - protein, 5 aa, synthetic construct
SPHKF

SEQ ID NO: 4713 - protein, 5 aa, synthetic construct
SPHKI

SEQ ID NO: 4714 - protein, 5 aa, synthetic construct
SPHKL

SEQ ID NO: 4715 - protein, 5 aa, synthetic construct
SPHKY

SEQ ID NO: 4716 - protein, 5 aa, synthetic construct
SPHTR

SEQ ID NO: 4717 - protein, 5 aa, synthetic construct
SPHKR

SEQ ID NO: 4718 - protein, 5 aa, synthetic construct
SPHGA

SEQ ID NO: 4719 - protein, 5 aa, synthetic construct
SPHSR

SEQ ID NO: 4720 - protein, 5 aa, synthetic construct
SPHSL

SEQ ID NO: 4721 - protein, 5 aa, synthetic construct
SPHSS

SEQ ID NO: 4722 - protein, 5 aa, synthetic construct
SPHFL

SEQ ID NO: 4723 - protein, 5 aa, synthetic construct
SPHWK

SEQ ID NO: 4724 - protein, 5 aa, synthetic construct
SPHGK

SEQ ID NO: 4725 - protein, 5 aa, synthetic construct
SPHTK

SEQ ID NO: 4726 - protein, 5 aa, synthetic construct
SPHNK

SEQ ID NO: 4727 - protein, 5 aa, synthetic construct
SPHAK

SEQ ID NO: 4728 - protein, 5 aa, synthetic construct
SPHKH

SEQ ID NO: 4729 - protein, 5 aa, synthetic construct
SPHKM

SEQ ID NO: 4730 - protein, 5 aa, synthetic construct
SPHRS

SEQ ID NO: 4731 - protein, 6 aa, synthetic construct
SPHSKT

SEQ ID NO: 4732 - protein, 6 aa, synthetic construct
SPHSKG

SEQ ID NO: 4733 - protein, 6 aa, synthetic construct
SPHGKA

SEQ ID NO: 4734 - protein, 6 aa, synthetic construct
SPHNKA

SEQ ID NO: 4735 - protein, 6 aa, synthetic construct
SPHSKN

SEQ ID NO: 4736 - protein, 6 aa, synthetic construct
SPHAKA

SEQ ID NO: 4737 - protein, 6 aa, synthetic construct
SPHSKV

SEQ ID NO: 4738 - protein, 6 aa, synthetic construct
SPHKTG

SEQ ID NO: 4739 - protein, 6 aa, synthetic construct
SPHTKA

SEQ ID NO: 4740 - protein, 6 aa, synthetic construct
SPHKSL

SEQ ID NO: 4741 - protein, 6 aa, synthetic construct
SPHKSE

SEQ ID NO: 4742 - protein, 6 aa, synthetic construct
SPHKSV

SEQ ID NO: 4743 - protein, 6 aa, synthetic construct
SPHKSW

SEQ ID NO: 4744 - protein, 6 aa, synthetic construct
SPHKSN

SEQ ID NO: 4745 - protein, 6 aa, synthetic construct
SPHKHG

SEQ ID NO: 4746 - protein, 6 aa, synthetic construct
SPHKSQ

SEQ ID NO: 4747 - protein, 6 aa, synthetic construct
SPHKSK

SEQ ID NO: 4748 - protein, 6 aa, synthetic construct
SPHKLW

SEQ ID NO: 4749 - protein, 6 aa, synthetic construct
SPHWKG

SEQ ID NO: 4750 - protein, 6 aa, synthetic construct
SPHKMG

SEQ ID NO: 4751 - protein, 6 aa, synthetic construct
SPHKMA

SEQ ID NO: 4752 - protein, 5 aa, synthetic construct
SGSPH

SEQ ID NO: 4753 - protein, 5 aa, synthetic construct
QDSPH

SEQ ID NO: 4754 - protein, 5 aa, synthetic construct
RGSPH

SEQ ID NO: 4755 - protein, 5 aa, synthetic construct
SHSPH

SEQ ID NO: 4756 - protein, 5 aa, synthetic construct
QSSPH

SEQ ID NO: 4757 - protein, 5 aa, synthetic construct
DDSPH

SEQ ID NO: 4758 - protein, 5 aa, synthetic construct
HESPH

SEQ ID NO: 4759 - protein, 5 aa, synthetic construct
NYSPH

SEQ ID NO: 4760 - protein, 5 aa, synthetic construct
VGSPH

SEQ ID NO: 4761 - protein, 5 aa, synthetic construct
SCSPH

SEQ ID NO: 4762 - protein, 5 aa, synthetic construct
LLSPH

SEQ ID NO: 4763 - protein, 5 aa, synthetic construct
NGSPH

SEQ ID NO: 4764 - protein, 5 aa, synthetic construct
PGSPH

SEQ ID NO: 4765 - protein, 5 aa, synthetic construct
GGSPH

SEQ ID NO: 4766 - protein, 5 aa, synthetic construct
TGSPH

SEQ ID NO: 4767 - protein, 5 aa, synthetic construct
SVSPH

SEQ ID NO: 4768 - protein, 5 aa, synthetic construct
IGSPH

SEQ ID NO: 4769 - protein, 5 aa, synthetic construct
DGSPH

SEQ ID NO: 4770 - protein, 5 aa, synthetic construct
LGSPH

SEQ ID NO: 4771 - protein, 5 aa, synthetic construct
AGSPH

SEQ ID NO: 4772 - protein, 5 aa, synthetic construct
EGSPH

SEQ ID NO: 4773 - protein, 5 aa, synthetic construct
SASPH

SEQ ID NO: 4774 - protein, 5 aa, synthetic construct
YDSPH

SEQ ID NO: 4775 - protein, 5 aa, synthetic construct
HGSPH

SEQ ID NO: 4776 - protein, 5 aa, synthetic construct
RDSPH

SEQ ID NO: 4777 - protein, 5 aa, synthetic construct
NDSPH

SEQ ID NO: 4778 - protein, 5 aa, synthetic construct
PDSPH

SEQ ID NO: 4779 - protein, 5 aa, synthetic construct
MGSPH

SEQ ID NO: 4780 - protein, 5 aa, synthetic construct
QVSPH

SEQ ID NO: 4781 - protein, 5 aa, synthetic construct
HNSPH

SEQ ID NO: 4782 - protein, 5 aa, synthetic construct
HPSPH

SEQ ID NO: 4783 - protein, 5 aa, synthetic construct
HSSPH

SEQ ID NO: 4784 - protein, 6 aa, synthetic construct
GHDSPH

SEQ ID NO: 4785 - protein, 6 aa, synthetic construct
GQDSPH

SEQ ID NO: 4786 - protein, 6 aa, synthetic construct
VSGSPH

SEQ ID NO: 4787 - protein, 6 aa, synthetic construct
CSGSPH

SEQ ID NO: 4788 - protein, 6 aa, synthetic construct
GRGSPH

SEQ ID NO: 4789 - protein, 6 aa, synthetic construct
CSHSPH

SEQ ID NO: 4790 - protein, 6 aa, synthetic construct
GQSSPH

SEQ ID NO: 4791 - protein, 6 aa, synthetic construct
GSHSPH

SEQ ID NO: 4792 - protein, 6 aa, synthetic construct
GDDSPH

SEQ ID NO: 4793 - protein, 6 aa, synthetic construct
GHESPH

SEQ ID NO: 4794 - protein, 6 aa, synthetic construct
GNYSPH

SEQ ID NO: 4795 - protein, 6 aa, synthetic construct
RVGSPH

SEQ ID NO: 4796 - protein, 6 aa, synthetic construct
GSCSPH

SEQ ID NO: 4797 - protein, 6 aa, synthetic construct
GLLSPH

SEQ ID NO: 4798 - protein, 6 aa, synthetic construct
MSGSPH

SEQ ID NO: 4799 - protein, 6 aa, synthetic construct
RNGSPH

SEQ ID NO: 4800 - protein, 6 aa, synthetic construct
TSGSPH

SEQ ID NO: 4801 - protein, 6 aa, synthetic construct
ISGSPH

SEQ ID NO: 4802 - protein, 6 aa, synthetic construct
GPGSPH

SEQ ID NO: 4803 - protein, 6 aa, synthetic construct
ESGSPH

SEQ ID NO: 4804 - protein, 6 aa, synthetic construct
SSGSPH

SEQ ID NO: 4805 - protein, 6 aa, synthetic construct
GNGSPH

SEQ ID NO: 4806 - protein, 6 aa, synthetic construct
ASGSPH

SEQ ID NO: 4807 - protein, 6 aa, synthetic construct
NSGSPH

SEQ ID NO: 4808 - protein, 6 aa, synthetic construct
LSGSPH

SEQ ID NO: 4809 - protein, 6 aa, synthetic construct
GGGSPH

SEQ ID NO: 4810 - protein, 6 aa, synthetic construct
KSGSPH

SEQ ID NO: 4811 - protein, 6 aa, synthetic construct
HSGSPH

SEQ ID NO: 4812 - protein, 6 aa, synthetic construct
GTGSPH

SEQ ID NO: 4813 - protein, 6 aa, synthetic construct
PSGSPH

SEQ ID NO: 4814 - protein, 6 aa, synthetic construct
GSVSPH

SEQ ID NO: 4815 - protein, 6 aa, synthetic construct
RSGSPH

SEQ ID NO: 4816 - protein, 6 aa, synthetic construct
GIGSPH

SEQ ID NO: 4817 - protein, 6 aa, synthetic construct
WSGSPH

SEQ ID NO: 4818 - protein, 6 aa, synthetic construct
DSGSPH

SEQ ID NO: 4819 - protein, 6 aa, synthetic construct
IDGSPH

SEQ ID NO: 4820 - protein, 6 aa, synthetic construct
GLGSPH

SEQ ID NO: 4821 - protein, 6 aa, synthetic construct
DAGSPH

SEQ ID NO: 4822 - protein, 6 aa, synthetic construct
DGGSPH

SEQ ID NO: 4823 - protein, 6 aa, synthetic construct
MEGSPH

SEQ ID NO: 4824 - protein, 6 aa, synthetic construct
ENGSPH

SEQ ID NO: 4825 - protein, 6 aa, synthetic construct
GSASPH

SEQ ID NO: 4826 - protein, 6 aa, synthetic construct
KNGSPH

SEQ ID NO: 4827 - protein, 6 aa, synthetic construct
KEGSPH

SEQ ID NO: 4828 - protein, 6 aa, synthetic construct
AIGSPH

SEQ ID NO: 4829 - protein, 6 aa, synthetic construct
GYDSPH

SEQ ID NO: 4830 - protein, 6 aa, synthetic construct
GHGSPH

SEQ ID NO: 4831 - protein, 6 aa, synthetic construct
GRDSPH

SEQ ID NO: 4832 - protein, 6 aa, synthetic construct
GNDSPH

SEQ ID NO: 4833 - protein, 6 aa, synthetic construct
GPDSPH

SEQ ID NO: 4834 - protein, 6 aa, synthetic construct
GMGSPH

SEQ ID NO: 4835 - protein, 6 aa, synthetic construct
GQVSPH

SEQ ID NO: 4836 - protein, 6 aa, synthetic construct
GHNSPH

SEQ ID NO: 4837 - protein, 6 aa, synthetic construct
GHPSPH

SEQ ID NO: 4838 - protein, 6 aa, synthetic construct
GHSSPH

SEQ ID NO: 4839 - protein, 7 aa, synthetic construct
SGSPHSK

SEQ ID NO: 4840 - protein, 7 aa, synthetic construct
HDSPHKS

SEQ ID NO: 4841 - protein, 7 aa, synthetic construct
SGSPHAR

SEQ ID NO: 4842 - protein, 7 aa, synthetic construct
SGSPHVK

SEQ ID NO: 4843 - protein, 7 aa, synthetic construct
QDSPHKS

SEQ ID NO: 4844 - protein, 7 aa, synthetic construct
SGSPHKK

SEQ ID NO: 4845 - protein, 7 aa, synthetic construct
SGSPHVR

SEQ ID NO: 4846 - protein, 7 aa, synthetic construct
SGSPHAS

SEQ ID NO: 4847 - protein, 7 aa, synthetic construct
SGSPHRK

SEQ ID NO: 4848 - protein, 7 aa, synthetic construct
SGSPHKT

SEQ ID NO: 4849 - protein, 7 aa, synthetic construct
SHSPHKS

SEQ ID NO: 4850 - protein, 7 aa, synthetic construct
QSSPHRS

SEQ ID NO: 4851 - protein, 7 aa, synthetic construct
RGSPHAS

SEQ ID NO: 4852 - protein, 7 aa, synthetic construct
RGSPHSK

SEQ ID NO: 4853 - protein, 7 aa, synthetic construct
SGSPHKF

SEQ ID NO: 4854 - protein, 7 aa, synthetic construct
SGSPHKI

SEQ ID NO: 4855 - protein, 7 aa, synthetic construct
SGSPHKL

SEQ ID NO: 4856 - protein, 7 aa, synthetic construct
SGSPHKY

SEQ ID NO: 4857 - protein, 7 aa, synthetic construct
SGSPHTR

SEQ ID NO: 4858 - protein, 7 aa, synthetic construct
SHSPHKR

SEQ ID NO: 4859 - protein, 7 aa, synthetic construct
SGSPHGA

SEQ ID NO: 4860 - protein, 7 aa, synthetic construct
HDSPHKR

SEQ ID NO: 4861 - protein, 7 aa, synthetic construct
DDSPHKS

SEQ ID NO: 4862 - protein, 7 aa, synthetic construct
HESPHKS

SEQ ID NO: 4863 - protein, 7 aa, synthetic construct
NYSPHKI

SEQ ID NO: 4864 - protein, 7 aa, synthetic construct
SGSPHSR

SEQ ID NO: 4865 - protein, 7 aa, synthetic construct
SGSPHSL

SEQ ID NO: 4866 - protein, 7 aa, synthetic construct
SGSPHSS

SEQ ID NO: 4867 - protein, 7 aa, synthetic construct
VGSPHSK

SEQ ID NO: 4868 - protein, 7 aa, synthetic construct
SCSPHRK

SEQ ID NO: 4869 - protein, 7 aa, synthetic construct
SGSPHFL

SEQ ID NO: 4870 - protein, 7 aa, synthetic construct
LLSPHWK

SEQ ID NO: 4871 - protein, 7 aa, synthetic construct
NGSPHSK

SEQ ID NO: 4872 - protein, 7 aa, synthetic construct
PGSPHSK

SEQ ID NO: 4873 - protein, 7 aa, synthetic construct
GGSPHSK

SEQ ID NO: 4874 - protein, 7 aa, synthetic construct
TGSPHSK

SEQ ID NO: 4875 - protein, 7 aa, synthetic construct
SVSPHGK

SEQ ID NO: 4876 - protein, 7 aa, synthetic construct
SGSPHTK

SEQ ID NO: 4877 - protein, 7 aa, synthetic construct
IGSPHSK

SEQ ID NO: 4878 - protein, 7 aa, synthetic construct
DGSPHSK

SEQ ID NO: 4879 - protein, 7 aa, synthetic construct
SGSPHNK

SEQ ID NO: 4880 - protein, 7 aa, synthetic construct
LGSPHSK

SEQ ID NO: 4881 - protein, 7 aa, synthetic construct
AGSPHSK

SEQ ID NO: 4882 - protein, 7 aa, synthetic construct
EGSPHSK

SEQ ID NO: 4883 - protein, 7 aa, synthetic construct
SASPHSK

SEQ ID NO: 4884 - protein, 7 aa, synthetic construct
SGSPHAK

SEQ ID NO: 4885 - protein, 7 aa, synthetic construct
HDSPHKI

SEQ ID NO: 4886 - protein, 7 aa, synthetic construct
YDSPHKS

SEQ ID NO: 4887 - protein, 7 aa, synthetic construct
HDSPHKT

SEQ ID NO: 4888 - protein, 7 aa, synthetic construct
RGSPHKR

SEQ ID NO: 4889 - protein, 7 aa, synthetic construct
HGSPHSK

SEQ ID NO: 4890 - protein, 7 aa, synthetic construct
RDSPHKS

SEQ ID NO: 4891 - protein, 7 aa, synthetic construct
NDSPHKS

SEQ ID NO: 4892 - protein, 7 aa, synthetic construct
QDSPHKI

SEQ ID NO: 4893 - protein, 7 aa, synthetic construct
PDSPHKI

SEQ ID NO: 4894 - protein, 7 aa, synthetic construct
PDSPHKS

SEQ ID NO: 4895 - protein, 7 aa, synthetic construct
MGSPHSK

SEQ ID NO: 4896 - protein, 7 aa, synthetic construct
HDSPHKH

SEQ ID NO: 4897 - protein, 7 aa, synthetic construct
QVSPHKS

SEQ ID NO: 4898 - protein, 7 aa, synthetic construct
HNSPHKS

SEQ ID NO: 4899 - protein, 7 aa, synthetic construct
NGSPHKR

SEQ ID NO: 4900 - protein, 7 aa, synthetic construct
HDSPHKY

SEQ ID NO: 4901 - protein, 7 aa, synthetic construct
NDSPHKI

SEQ ID NO: 4902 - protein, 7 aa, synthetic construct
HDSPHKL

SEQ ID NO: 4903 - protein, 7 aa, synthetic construct
HPSPHWK

SEQ ID NO: 4904 - protein, 7 aa, synthetic construct
HDSPHKM

SEQ ID NO: 4905 - protein, 7 aa, synthetic construct
HSSPHRS

SEQ ID NO: 4906 - protein, 9 aa, synthetic construct
GSGSPHARM

SEQ ID NO: 4907 - protein, 9 aa, synthetic construct
GSGSPHVKS

SEQ ID NO: 4908 - protein, 9 aa, synthetic construct
GQDSPHKSG

SEQ ID NO: 4909 - protein, 9 aa, synthetic construct
GSGSPHASR

SEQ ID NO: 4910 - protein, 9 aa, synthetic construct
GSGSPHVKI

SEQ ID NO: 4911 - protein, 9 aa, synthetic construct
GSGSPHKKN

SEQ ID NO: 4912 - protein, 9 aa, synthetic construct
GSGSPHVRM

SEQ ID NO: 4913 - protein, 9 aa, synthetic construct
VSGSPHSKA

SEQ ID NO: 4914 - protein, 9 aa, synthetic construct
CSGSPHSKA

SEQ ID NO: 4915 - protein, 9 aa, synthetic construct
GSGSPHRKA

SEQ ID NO: 4916 - protein, 9 aa, synthetic construct
CSGSPHKTS

SEQ ID NO: 4917 - protein, 9 aa, synthetic construct
CSHSPHKSG

SEQ ID NO: 4918 - protein, 9 aa, synthetic construct
GQSSPHRSG

SEQ ID NO: 4919 - protein, 9 aa, synthetic construct
GRGSPHASR

SEQ ID NO: 4920 - protein, 9 aa, synthetic construct
GRGSPHSKA

SEQ ID NO: 4921 - protein, 9 aa, synthetic construct
GSGSPHKFG

SEQ ID NO: 4922 - protein, 9 aa, synthetic construct
GSGSPHKIG

SEQ ID NO: 4923 - protein, 9 aa, synthetic construct
GSGSPHKLG

SEQ ID NO: 4924 - protein, 9 aa, synthetic construct
GSGSPHKTS

SEQ ID NO: 4925 - protein, 9 aa, synthetic construct
GSGSPHKTT

SEQ ID NO: 4926 - protein, 9 aa, synthetic construct
GSGSPHKTY

SEQ ID NO: 4927 - protein, 9 aa, synthetic construct
GSGSPHKYG

SEQ ID NO: 4928 - protein, 9 aa, synthetic construct
GSGSPHSKD

SEQ ID NO: 4929 - protein, 9 aa, synthetic construct
GSGSPHSKP

SEQ ID NO: 4930 - protein, 9 aa, synthetic construct
GSGSPHTRG

SEQ ID NO: 4931 - protein, 9 aa, synthetic construct
GSGSPHVRG

SEQ ID NO: 4932 - protein, 9 aa, synthetic construct
GSHSPHKRG

SEQ ID NO: 4933 - protein, 9 aa, synthetic construct
GSHSPHKSG

SEQ ID NO: 4934 - protein, 9 aa, synthetic construct
VSGSPHASR

SEQ ID NO: 4935 - protein, 9 aa, synthetic construct
VSGSPHGAR

SEQ ID NO: 4936 - protein, 9 aa, synthetic construct
VSGSPHKFG

SEQ ID NO: 4937 - protein, 9 aa, synthetic construct
GHDSPHKRG

SEQ ID NO: 4938 - protein, 9 aa, synthetic construct
GDDSPHKSG

SEQ ID NO: 4939 - protein, 9 aa, synthetic construct
GHESPHKSA

SEQ ID NO: 4940 - protein, 9 aa, synthetic construct
GHDSPHKSA

SEQ ID NO: 4941 - protein, 9 aa, synthetic construct
GNYSPHKIG

SEQ ID NO: 4942 - protein, 9 aa, synthetic construct
GHDSPHKSR

SEQ ID NO: 4943 - protein, 9 aa, synthetic construct
GSGSPHSKL

SEQ ID NO: 4944 - protein, 9 aa, synthetic construct
GSGSPHSRA

SEQ ID NO: 4945 - protein, 9 aa, synthetic construct
GSGSPHSKR

SEQ ID NO: 4946 - protein, 9 aa, synthetic construct
GSGSPHSLR

SEQ ID NO: 4947 - protein, 9 aa, synthetic construct
GSGSPHSRG

SEQ ID NO: 4948 - protein, 9 aa, synthetic construct
GSGSPHSSR

SEQ ID NO: 4949 - protein, 9 aa, synthetic construct
RVGSPHSKA

SEQ ID NO: 4950 - protein, 9 aa, synthetic construct
GSCSPHRKA

SEQ ID NO: 4951 - protein, 9 aa, synthetic construct
GSGSPHFLR

SEQ ID NO: 4952 - protein, 9 aa, synthetic construct
GSGSPHSKW

SEQ ID NO: 4953 - protein, 9 aa, synthetic construct
GSGSPHSKS

SEQ ID NO: 4954 - protein, 9 aa, synthetic construct
GLLSPHWKA

SEQ ID NO: 4955 - protein, 9 aa, synthetic construct
GSGSPHVRR

SEQ ID NO: 4956 - protein, 9 aa, synthetic construct
GSGSPHSKV

SEQ ID NO: 4957 - protein, 9 aa, synthetic construct
MSGSPHSKA

SEQ ID NO: 4958 - protein, 9 aa, synthetic construct
RNGSPHSKA

SEQ ID NO: 4959 - protein, 9 aa, synthetic construct
TSGSPHSKA

SEQ ID NO: 4960 - protein, 9 aa, synthetic construct
ISGSPHSKA

SEQ ID NO: 4961 - protein, 9 aa, synthetic construct
GPGSPHSKA

SEQ ID NO: 4962 - protein, 9 aa, synthetic construct
GSGSPHSKT

SEQ ID NO: 4963 - protein, 9 aa, synthetic construct
ESGSPHSKA

SEQ ID NO: 4964 - protein, 9 aa, synthetic construct
SSGSPHSKA

SEQ ID NO: 4965 - protein, 9 aa, synthetic construct
GNGSPHSKA

SEQ ID NO: 4966 - protein, 9 aa, synthetic construct
ASGSPHSKA

SEQ ID NO: 4967 - protein, 9 aa, synthetic construct
NSGSPHSKA

SEQ ID NO: 4968 - protein, 9 aa, synthetic construct
LSGSPHSKA

SEQ ID NO: 4969 - protein, 9 aa, synthetic construct
GGGSPHSKA

SEQ ID NO: 4970 - protein, 9 aa, synthetic construct
KSGSPHSKA

SEQ ID NO: 4971 - protein, 9 aa, synthetic construct
GGGSPHSKS

SEQ ID NO: 4972 - protein, 9 aa, synthetic construct
GSGSPHSKG

SEQ ID NO: 4973 - protein, 9 aa, synthetic construct
HSGSPHSKA

SEQ ID NO: 4974 - protein, 9 aa, synthetic construct
GTGSPHSKA

SEQ ID NO: 4975 - protein, 9 aa, synthetic construct
PSGSPHSKA

SEQ ID NO: 4976 - protein, 9 aa, synthetic construct
GSVSPHGKA

SEQ ID NO: 4977 - protein, 9 aa, synthetic construct
RSGSPHSKA

SEQ ID NO: 4978 - protein, 9 aa, synthetic construct
GSGSPHTKA

SEQ ID NO: 4979 - protein, 9 aa, synthetic construct
GIGSPHSKA

SEQ ID NO: 4980 - protein, 9 aa, synthetic construct
WSGSPHSKA

SEQ ID NO: 4981 - protein, 9 aa, synthetic construct
DSGSPHSKA

SEQ ID NO: 4982 - protein, 9 aa, synthetic construct
IDGSPHSKA

SEQ ID NO: 4983 - protein, 9 aa, synthetic construct
GSGSPHNKA

SEQ ID NO: 4984 - protein, 9 aa, synthetic construct
GLGSPHSKS

SEQ ID NO: 4985 - protein, 9 aa, synthetic construct
DAGSPHSKA

SEQ ID NO: 4986 - protein, 9 aa, synthetic construct
DGGSPHSKA

SEQ ID NO: 4987 - protein, 9 aa, synthetic construct
MEGSPHSKA

SEQ ID NO: 4988 - protein, 9 aa, synthetic construct
ENGSPHSKA

SEQ ID NO: 4989 - protein, 9 aa, synthetic construct
GSASPHSKA

SEQ ID NO: 4990 - protein, 9 aa, synthetic construct
GNGSPHSKS

SEQ ID NO: 4991 - protein, 9 aa, synthetic construct
KNGSPHSKA

SEQ ID NO: 4992 - protein, 9 aa, synthetic construct
KEGSPHSKA

SEQ ID NO: 4993 - protein, 9 aa, synthetic construct
AIGSPHSKA

SEQ ID NO: 4994 - protein, 9 aa, synthetic construct
GSGSPHSKN

SEQ ID NO: 4995 - protein, 9 aa, synthetic construct
GSGSPHAKA

SEQ ID NO: 4996 - protein, 9 aa, synthetic construct
GHDSPHKIG

SEQ ID NO: 4997 - protein, 9 aa, synthetic construct
GYDSPHKSG

SEQ ID NO: 4998 - protein, 9 aa, synthetic construct
GHESPHKSG

SEQ ID NO: 4999 - protein, 9 aa, synthetic construct
GHDSPHKTG

SEQ ID NO: 5000 - protein, 9 aa, synthetic construct
GRGSPHKRG

SEQ ID NO: 5001 - protein, 9 aa, synthetic construct
GHDSPHKSL

SEQ ID NO: 5002 - protein, 9 aa, synthetic construct
GHGSPHSKA

SEQ ID NO: 5003 - protein, 9 aa, synthetic construct
GHDSPHKSE

SEQ ID NO: 5004 - protein, 9 aa, synthetic construct
GRDSPHKSG

SEQ ID NO: 5005 - protein, 9 aa, synthetic construct
GNDSPHKSV

SEQ ID NO: 5006 - protein, 9 aa, synthetic construct
GQDSPHKIG

SEQ ID NO: 5007 - protein, 9 aa, synthetic construct
GHDSPHKSV

SEQ ID NO: 5008 - protein, 9 aa, synthetic construct
GPDSPHKIG

SEQ ID NO: 5009 - protein, 9 aa, synthetic construct
GPDSPHKSG

SEQ ID NO: 5010 - protein, 9 aa, synthetic construct
GHDSPHKSW

SEQ ID NO: 5011 - protein, 9 aa, synthetic construct
GHDSPHKSN

SEQ ID NO: 5012 - protein, 9 aa, synthetic construct
GMGSPHSKT

SEQ ID NO: 5013 - protein, 9 aa, synthetic construct
GHDSPHKHG

SEQ ID NO: 5014 - protein, 9 aa, synthetic construct
GQVSPHKSG

SEQ ID NO: 5015 - protein, 9 aa, synthetic construct
GDDSPHKSV

SEQ ID NO: 5016 - protein, 9 aa, synthetic construct
GHNSPHKSG

SEQ ID NO: 5017 - protein, 9 aa, synthetic construct
GNGSPHKRG

SEQ ID NO: 5018 - protein, 9 aa, synthetic construct
GHDSPHKYG

SEQ ID NO: 5019 - protein, 9 aa, synthetic construct
GHDSPHKSQ

SEQ ID NO: 5020 - protein, 9 aa, synthetic construct
GNDSPHKIG

SEQ ID NO: 5021 - protein, 9 aa, synthetic construct
GHDSPHKSK

SEQ ID NO: 5022 - protein, 9 aa, synthetic construct
GHDSPHKLW

SEQ ID NO: 5023 - protein, 9 aa, synthetic construct
GHPSPHWKG

SEQ ID NO: 5024 - protein, 9 aa, synthetic construct
GHDSPHKMG

SEQ ID NO: 5025 - protein, 9 aa, synthetic construct
GHDSPHKMA

SEQ ID NO: 5026 - protein, 9 aa, synthetic construct
GHSSPHRSG

SEQ ID NO: 5027 - protein, 8 aa, synthetic construct
SGSPHKYG

SEQ ID NO: 5028 - protein, 4 aa, synthetic construct
QNQQ

SEQ ID NO: 5029 - protein, 4 aa, synthetic construct
WNQQ

SEQ ID NO: 5030 - protein, 4 aa, synthetic construct
QYYV

SEQ ID NO: 5031 - protein, 4 aa, synthetic construct
RRQQ

SEQ ID NO: 5032 - protein, 4 aa, synthetic construct
GCGQ

SEQ ID NO: 5033 - protein, 4 aa, synthetic construct
LRQQ

SEQ ID NO: 5034 - protein, 4 aa, synthetic construct
RNQQ

SEQ ID NO: 5035 - protein, 4 aa, synthetic construct
VNQQ

SEQ ID NO: 5036 - protein, 4 aa, synthetic construct
FRLQ

SEQ ID NO: 5037 - protein, 4 aa, synthetic construct
FNQQ

SEQ ID NO: 5038 - protein, 4 aa, synthetic construct
LLQQ

SEQ ID NO: 5039 - protein, 4 aa, synthetic construct
SNQQ

SEQ ID NO: 5040 - protein, 4 aa, synthetic construct
RLQQ

SEQ ID NO: 5041 - protein, 4 aa, synthetic construct
LNQQ

SEQ ID NO: 5042 - protein, 4 aa, synthetic construct
QRKL

SEQ ID NO: 5043 - protein, 4 aa, synthetic construct
LRRQ

SEQ ID NO: 5044 - protein, 4 aa, synthetic construct
QRLR

SEQ ID NO: 5045 - protein, 4 aa, synthetic construct
QRRL

SEQ ID NO: 5046 - protein, 4 aa, synthetic construct
RRLQ

SEQ ID NO: 5047 - protein, 4 aa, synthetic construct
RLRQ

SEQ ID NO: 5048 - protein, 4 aa, synthetic construct
SKRQ

SEQ ID NO: 5049 - protein, 4 aa, synthetic construct
QLYR

SEQ ID NO: 5050 - protein, 4 aa, synthetic construct
QLTV

SEQ ID NO: 5051 - protein, 4 aa, synthetic construct
QNKQ

SEQ ID NO: 5052 - protein, 4 aa, synthetic construct
KNQQ

SEQ ID NO: 5053 - protein, 4 aa, synthetic construct
QKQQ

SEQ ID NO: 5054 - protein, 4 aa, synthetic construct
QTQQ

SEQ ID NO: 5055 - protein, 4 aa, synthetic construct
QNHQ

SEQ ID NO: 5056 - protein, 4 aa, synthetic construct
QHQQ

SEQ ID NO: 5057 - protein, 4 aa, synthetic construct
QNQH

SEQ ID NO: 5058 - protein, 4 aa, synthetic construct
QHRQ

SEQ ID NO: 5059 - protein, 4 aa, synthetic construct
LTQQ

SEQ ID NO: 5060 - protein, 4 aa, synthetic construct
QNQW

SEQ ID NO: 5061 - protein, 4 aa, synthetic construct
QNTH

SEQ ID NO: 5062 - protein, 4 aa, synthetic construct
RRRQ

SEQ ID NO: 5063 - protein, 4 aa, synthetic construct
QYQQ

SEQ ID NO: 5064 - protein, 4 aa, synthetic construct
QNDQ

SEQ ID NO: 5065 - protein, 4 aa, synthetic construct
QNRH

SEQ ID NO: 5066 - protein, 4 aa, synthetic construct
RDQQ

SEQ ID NO: 5067 - protein, 4 aa, synthetic construct
PNLQ

SEQ ID NO: 5068 - protein, 4 aa, synthetic construct
HVRQ

SEQ ID NO: 5069 - protein, 4 aa, synthetic construct
PNQH

SEQ ID NO: 5070 - protein, 4 aa, synthetic construct
HNQQ

SEQ ID NO: 5071 - protein, 4 aa, synthetic construct
QSQQ

SEQ ID NO: 5072 - protein, 4 aa, synthetic construct
QPAK

SEQ ID NO: 5073 - protein, 4 aa, synthetic construct
QNLA

SEQ ID NO: 5074 - protein, 4 aa, synthetic construct
QNQL

SEQ ID NO: 5075 - protein, 4 aa, synthetic construct
QGQQ

SEQ ID NO: 5076 - protein, 4 aa, synthetic construct
LNRQ

SEQ ID NO: 5077 - protein, 4 aa, synthetic construct
QNPP

SEQ ID NO: 5078 - protein, 4 aa, synthetic construct
QNLQ

SEQ ID NO: 5079 - protein, 4 aa, synthetic construct
QDQE

SEQ ID NO: 5080 - protein, 4 aa, synthetic construct
QDQQ

SEQ ID NO: 5081 - protein, 4 aa, synthetic construct
HWQQ

SEQ ID NO: 5082 - protein, 4 aa, synthetic construct
PNQQ

SEQ ID NO: 5083 - protein, 4 aa, synthetic construct
PEQQ

SEQ ID NO: 5084 - protein, 4 aa, synthetic construct
QRTM

SEQ ID NO: 5085 - protein, 4 aa, synthetic construct
LHQH

SEQ ID NO: 5086 - protein, 4 aa, synthetic construct
QHRI

SEQ ID NO: 5087 - protein, 4 aa, synthetic construct
QYIH

SEQ ID NO: 5088 - protein, 4 aa, synthetic construct
QKFE

SEQ ID NO: 5089 - protein, 4 aa, synthetic construct
QFPS

SEQ ID NO: 5090 - protein, 4 aa, synthetic construct
QNPL

SEQ ID NO: 5091 - protein, 4 aa, synthetic construct
QAIK

SEQ ID NO: 5092 - protein, 4 aa, synthetic construct
QNRQ

SEQ ID NO: 5093 - protein, 4 aa, synthetic construct
QYQH

SEQ ID NO: 5094 - protein, 4 aa, synthetic construct
QNPQ

SEQ ID NO: 5095 - protein, 4 aa, synthetic construct
QHQL

SEQ ID NO: 5096 - protein, 4 aa, synthetic construct
QSPP

SEQ ID NO: 5097 - protein, 4 aa, synthetic construct
QAKL

SEQ ID NO: 5098 - protein, 4 aa, synthetic construct
KSQQ

SEQ ID NO: 5099 - protein, 4 aa, synthetic construct
QDRP

SEQ ID NO: 5100 - protein, 4 aa, synthetic construct
QNLG

SEQ ID NO: 5101 - protein, 4 aa, synthetic construct
QAFH

SEQ ID NO: 5102 - protein, 4 aa, synthetic construct
QNAQ

SEQ ID NO: 5103 - protein, 4 aa, synthetic construct
HNQL

SEQ ID NO: 5104 - protein, 4 aa, synthetic construct
QKLN

SEQ ID NO: 5105 - protein, 4 aa, synthetic construct
QNVQ

SEQ ID NO: 5106 - protein, 4 aa, synthetic construct
QAQQ

SEQ ID NO: 5107 - protein, 4 aa, synthetic construct
QTPP

SEQ ID NO: 5108 - protein, 4 aa, synthetic construct
QPPA

SEQ ID NO: 5109 - protein, 4 aa, synthetic construct
QERP

SEQ ID NO: 5110 - protein, 4 aa, synthetic construct
QDLQ

SEQ ID NO: 5111 - protein, 4 aa, synthetic construct
QAMH

SEQ ID NO: 5112 - protein, 4 aa, synthetic construct
QHPS

SEQ ID NO: 5113 - protein, 4 aa, synthetic construct
PGLQ

SEQ ID NO: 5114 - protein, 4 aa, synthetic construct
QGIR

SEQ ID NO: 5115 - protein, 4 aa, synthetic construct
QAPA

SEQ ID NO: 5116 - protein, 4 aa, synthetic construct
QIPP

SEQ ID NO: 5117 - protein, 4 aa, synthetic construct
QTQL

SEQ ID NO: 5118 - protein, 4 aa, synthetic construct
QAPS

SEQ ID NO: 5119 - protein, 4 aa, synthetic construct
QNTY

SEQ ID NO: 5120 - protein, 4 aa, synthetic construct
QDKQ

SEQ ID NO: 5121 - protein, 4 aa, synthetic construct
QNHL

SEQ ID NO: 5122 - protein, 4 aa, synthetic construct
QIGM

SEQ ID NO: 5123 - protein, 4 aa, synthetic construct
LNKQ

SEQ ID NO: 5124 - protein, 4 aa, synthetic construct
PNQL

SEQ ID NO: 5125 - protein, 4 aa, synthetic construct
QLQQ

SEQ ID NO: 5126 - protein, 4 aa, synthetic construct
QRMS

SEQ ID NO: 5127 - protein, 4 aa, synthetic construct
QGIL

SEQ ID NO: 5128 - protein, 4 aa, synthetic construct
QDRQ

SEQ ID NO: 5129 - protein, 4 aa, synthetic construct
RDWQ

SEQ ID NO: 5130 - protein, 4 aa, synthetic construct
QERS

SEQ ID NO: 5131 - protein, 4 aa, synthetic construct
QNYQ

SEQ ID NO: 5132 - protein, 4 aa, synthetic construct
QRTC

SEQ ID NO: 5133 - protein, 4 aa, synthetic construct
QIGH

SEQ ID NO: 5134 - protein, 4 aa, synthetic construct
QGAI

SEQ ID NO: 5135 - protein, 4 aa, synthetic construct
QVPP

SEQ ID NO: 5136 - protein, 4 aa, synthetic construct
QVQQ

SEQ ID NO: 5137 - protein, 4 aa, synthetic construct
LMRQ

SEQ ID NO: 5138 - protein, 4 aa, synthetic construct
QYSV

SEQ ID NO: 5139 - protein, 4 aa, synthetic construct
QAIT

SEQ ID NO: 5140 - protein, 4 aa, synthetic construct
QKTL

SEQ ID NO: 5141 - protein, 4 aa, synthetic construct
QLHH

SEQ ID NO: 5142 - protein, 4 aa, synthetic construct
QNII

SEQ ID NO: 5143 - protein, 4 aa, synthetic construct
QGHH

SEQ ID NO: 5144 - protein, 4 aa, synthetic construct
QSKV

SEQ ID NO: 5145 - protein, 4 aa, synthetic construct
QLPS

SEQ ID NO: 5146 - protein, 4 aa, synthetic construct
IGKQ

SEQ ID NO: 5147 - protein, 4 aa, synthetic construct
QAIH

SEQ ID NO: 5148 - protein, 4 aa, synthetic construct
QHGL

SEQ ID NO: 5149 - protein, 4 aa, synthetic construct
QFMC

SEQ ID NO: 5150 - protein, 4 aa, synthetic construct
QNQM

SEQ ID NO: 5151 - protein, 4 aa, synthetic construct
QHLQ

SEQ ID NO: 5152 - protein, 4 aa, synthetic construct
QPAR

SEQ ID NO: 5153 - protein, 4 aa, synthetic construct
QSLQ

SEQ ID NO: 5154 - protein, 4 aa, synthetic construct
QSQL

SEQ ID NO: 5155 - protein, 4 aa, synthetic construct
HSQQ

SEQ ID NO: 5156 - protein, 4 aa, synthetic construct
QMPS

SEQ ID NO: 5157 - protein, 4 aa, synthetic construct
QGSL

SEQ ID NO: 5158 - protein, 4 aa, synthetic construct
QVPA

SEQ ID NO: 5159 - protein, 4 aa, synthetic construct
HYQQ

SEQ ID NO: 5160 - protein, 4 aa, synthetic construct
QVPS

SEQ ID NO: 5161 - protein, 4 aa, synthetic construct
RGEQ

SEQ ID NO: 5162 - protein, 4 aa, synthetic construct
PGQQ

SEQ ID NO: 5163 - protein, 4 aa, synthetic construct
LEQQ

SEQ ID NO: 5164 - protein, 4 aa, synthetic construct
QNQS

SEQ ID NO: 5165 - protein, 4 aa, synthetic construct
QKVI

SEQ ID NO: 5166 - protein, 4 aa, synthetic construct
QNND

SEQ ID NO: 5167 - protein, 4 aa, synthetic construct
QSVH

SEQ ID NO: 5168 - protein, 4 aa, synthetic construct
QPLG

SEQ ID NO: 5169 - protein, 4 aa, synthetic construct
HNQE

SEQ ID NO: 5170 - protein, 4 aa, synthetic construct
QIQQ

SEQ ID NO: 5171 - protein, 4 aa, synthetic construct
QVRN

SEQ ID NO: 5172 - protein, 4 aa, synthetic construct
PSNQ

SEQ ID NO: 5173 - protein, 4 aa, synthetic construct
QVGH

SEQ ID NO: 5174 - protein, 4 aa, synthetic construct
QRDI

SEQ ID NO: 5175 - protein, 4 aa, synthetic construct
QMPN

SEQ ID NO: 5176 - protein, 4 aa, synthetic construct
RGLQ

SEQ ID NO: 5177 - protein, 4 aa, synthetic construct
PSLQ

SEQ ID NO: 5178 - protein, 4 aa, synthetic construct
QRDQ

SEQ ID NO: 5179 - protein, 4 aa, synthetic construct
QAKG

SEQ ID NO: 5180 - protein, 4 aa, synthetic construct
QSAH

SEQ ID NO: 5181 - protein, 4 aa, synthetic construct
QSTM

SEQ ID NO: 5182 - protein, 4 aa, synthetic construct
QREM

SEQ ID NO: 5183 - protein, 4 aa, synthetic construct
QYRA

SEQ ID NO: 5184 - protein, 4 aa, synthetic construct
QRQQ

SEQ ID NO: 5185 - protein, 4 aa, synthetic construct
QWQQ

SEQ ID NO: 5186 - protein, 4 aa, synthetic construct
QRMN

SEQ ID NO: 5187 - protein, 4 aa, synthetic construct
GDSQ

SEQ ID NO: 5188 - protein, 4 aa, synthetic construct
QKIS

SEQ ID NO: 5189 - protein, 4 aa, synthetic construct
PSMQ

SEQ ID NO: 5190 - protein, 4 aa, synthetic construct
SPRQ

SEQ ID NO: 5191 - protein, 4 aa, synthetic construct
MEQQ

SEQ ID NO: 5192 - protein, 4 aa, synthetic construct
QYQN

SEQ ID NO: 5193 - protein, 4 aa, synthetic construct
QIRQ

SEQ ID NO: 5194 - protein, 4 aa, synthetic construct
QSVQ

SEQ ID NO: 5195 - protein, 4 aa, synthetic construct
RSQQ

SEQ ID NO: 5196 - protein, 4 aa, synthetic construct
QNKL

SEQ ID NO: 5197 - protein, 4 aa, synthetic construct
QIQH

SEQ ID NO: 5198 - protein, 4 aa, synthetic construct
PRQQ

SEQ ID NO: 5199 - protein, 4 aa, synthetic construct
HTQQ

SEQ ID NO: 5200 - protein, 4 aa, synthetic construct
QRQH

SEQ ID NO: 5201 - protein, 4 aa, synthetic construct
RNQE

SEQ ID NO: 5202 - protein, 4 aa, synthetic construct
QSKQ

SEQ ID NO: 5203 - protein, 4 aa, synthetic construct
QNQP

SEQ ID NO: 5204 - protein, 4 aa, synthetic construct
QSPQ

SEQ ID NO: 5205 - protein, 4 aa, synthetic construct
QTRQ

SEQ ID NO: 5206 - protein, 4 aa, synthetic construct
QNLH

SEQ ID NO: 5207 - protein, 4 aa, synthetic construct
QNQE

SEQ ID NO: 5208 - protein, 4 aa, synthetic construct
LNQP

SEQ ID NO: 5209 - protein, 4 aa, synthetic construct
QNQD

SEQ ID NO: 5210 - protein, 4 aa, synthetic construct
QNLL

SEQ ID NO: 5211 - protein, 4 aa, synthetic construct
QLVI

SEQ ID NO: 5212 - protein, 4 aa, synthetic construct
RTQE

SEQ ID NO: 5213 - protein, 4 aa, synthetic construct
QTHQ

SEQ ID NO: 5214 - protein, 4 aa, synthetic construct
QDQH

SEQ ID NO: 5215 - protein, 4 aa, synthetic construct
QSQH

SEQ ID NO: 5216 - protein, 4 aa, synthetic construct
VRQQ

SEQ ID NO: 5217 - protein, 4 aa, synthetic construct
AWQQ

SEQ ID NO: 5218 - protein, 4 aa, synthetic construct
QSVP

SEQ ID NO: 5219 - protein, 4 aa, synthetic construct
QNIQ

SEQ ID NO: 5220 - protein, 4 aa, synthetic construct
LDQQ

SEQ ID NO: 5221 - protein, 4 aa, synthetic construct
PDQQ

SEQ ID NO: 5222 - protein, 4 aa, synthetic construct
ESQQ

SEQ ID NO: 5223 - protein, 4 aa, synthetic construct
QRQL

SEQ ID NO: 5224 - protein, 4 aa, synthetic construct
QIIV

SEQ ID NO: 5225 - protein, 4 aa, synthetic construct
QKQS

SEQ ID NO: 5226 - protein, 4 aa, synthetic construct
QSHQ

SEQ ID NO: 5227 - protein, 4 aa, synthetic construct
QFVV

SEQ ID NO: 5228 - protein, 4 aa, synthetic construct
QSQP

SEQ ID NO: 5229 - protein, 4 aa, synthetic construct
QNEQ

SEQ ID NO: 5230 - protein, 4 aa, synthetic construct
INQQ

SEQ ID NO: 5231 - protein, 4 aa, synthetic construct
RNRQ

SEQ ID NO: 5232 - protein, 4 aa, synthetic construct
RDQK

SEQ ID NO: 5233 - protein, 4 aa, synthetic construct
QWKR

SEQ ID NO: 5234 - protein, 4 aa, synthetic construct
ENRQ

SEQ ID NO: 5235 - protein, 4 aa, synthetic construct
QTQP

SEQ ID NO: 5236 - protein, 4 aa, synthetic construct
QKQL

SEQ ID NO: 5237 - protein, 4 aa, synthetic construct
RNQL

SEQ ID NO: 5238 - protein, 4 aa, synthetic construct
ISIQ

SEQ ID NO: 5239 - protein, 4 aa, synthetic construct
QTVC

SEQ ID NO: 5240 - protein, 4 aa, synthetic construct
QQIM

SEQ ID NO: 5241 - protein, 4 aa, synthetic construct
LNHQ

SEQ ID NO: 5242 - protein, 4 aa, synthetic construct
QNQA

SEQ ID NO: 5243 - protein, 4 aa, synthetic construct
QMIH

SEQ ID NO: 5244 - protein, 4 aa, synthetic construct
RNHQ

SEQ ID NO: 5245 - protein, 4 aa, synthetic construct
QKMN

SEQ ID NO: 5246 - protein, 17 aa, synthetic construct
TINGSGSPHKYGQNQQT

SEQ ID NO: 5247 - protein, 7 aa, synthetic construct
SLLWNQQ

SEQ ID NO: 5248 - protein, 7 aa, synthetic construct
SKAQYYV

SEQ ID NO: 5249 - protein, 7 aa, synthetic construct
SKLRRQQ

SEQ ID NO: 5250 - protein, 7 aa, synthetic construct
SIWQNQQ

SEQ ID NO: 5251 - protein, 7 aa, synthetic construct
SKAGCGQ

SEQ ID NO: 5252 - protein, 7 aa, synthetic construct
SRAQNQQ

SEQ ID NO: 5253 - protein, 7 aa, synthetic construct
SKRLRQQ

SEQ ID NO: 5254 - protein, 7 aa, synthetic construct
SLRRNQQ

SEQ ID NO: 5255 - protein, 7 aa, synthetic construct
SRGRNQQ

SEQ ID NO: 5256 - protein, 7 aa, synthetic construct
SEIVNQQ

SEQ ID NO: 5257 - protein, 7 aa, synthetic construct
SSRRNQQ

SEQ ID NO: 5258 - protein, 7 aa, synthetic construct
CLLQNQQ

SEQ ID NO: 5259 - protein, 7 aa, synthetic construct
SKAFRLQ

SEQ ID NO: 5260 - protein, 7 aa, synthetic construct
CLAQNQQ

SEQ ID NO: 5261 - protein, 7 aa, synthetic construct
FLRQNQQ

SEQ ID NO: 5262 - protein, 7 aa, synthetic construct
SLRFNQQ

SEQ ID NO: 5263 - protein, 7 aa, synthetic construct
SYLRNQQ

SEQ ID NO: 5264 - protein, 7 aa, synthetic construct
CSLQNQQ

SEQ ID NO: 5265 - protein, 7 aa, synthetic construct
VLWQNQQ

SEQ ID NO: 5266 - protein, 7 aa, synthetic construct
SKWLLQQ

SEQ ID NO: 5267 - protein, 7 aa, synthetic construct
SLWSNQQ

SEQ ID NO: 5268 - protein, 7 aa, synthetic construct
SKRRLQQ

SEQ ID NO: 5269 - protein, 7 aa, synthetic construct
SVYLNQQ

SEQ ID NO: 5270 - protein, 7 aa, synthetic construct
SLWLNQQ

SEQ ID NO: 5271 - protein, 7 aa, synthetic construct
SKAQRKL

SEQ ID NO: 5272 - protein, 7 aa, synthetic construct
SKALRRQ

SEQ ID NO: 5273 - protein, 7 aa, synthetic construct
SKAQRLR

SEQ ID NO: 5274 - protein, 7 aa, synthetic construct
SKAQNQQ

SEQ ID NO: 5275 - protein, 7 aa, synthetic construct
SKAQRRL

SEQ ID NO: 5276 - protein, 7 aa, synthetic construct
SKARRQQ

SEQ ID NO: 5277 - protein, 7 aa, synthetic construct
SKARRLQ

SEQ ID NO: 5278 - protein, 7 aa, synthetic construct
SKSRRQQ

SEQ ID NO: 5279 - protein, 7 aa, synthetic construct
SKARLRQ

SEQ ID NO: 5280 - protein, 7 aa, synthetic construct
SKASKRQ

SEQ ID NO: 5281 - protein, 7 aa, synthetic construct
VRRQNQQ

SEQ ID NO: 5282 - protein, 7 aa, synthetic construct
SKAQLYR

SEQ ID NO: 5283 - protein, 7 aa, synthetic construct
SLFRNQQ

SEQ ID NO: 5284 - protein, 7 aa, synthetic construct
SKAQLTV

SEQ ID NO: 5285 - protein, 13 aa, synthetic construct
GSGSPHSLLWNQQ

SEQ ID NO: 5286 - protein, 13 aa, synthetic construct
GSGSPHSIWQNQQ

SEQ ID NO: 5287 - protein, 13 aa, synthetic construct
GSGSPHSEIVNQQ

SEQ ID NO: 5288 - protein, 13 aa, synthetic construct
GSGSPHCLLQNQQ

SEQ ID NO: 5289 - protein, 13 aa, synthetic construct
GSGSPHCLAQNQQ

SEQ ID NO: 5290 - protein, 13 aa, synthetic construct
GSGSPHSYLRNQQ

SEQ ID NO: 5291 - protein, 13 aa, synthetic construct
GSGSPHCSLQNQQ

SEQ ID NO: 5292 - protein, 13 aa, synthetic construct
GSGSPHVLWQNQQ

SEQ ID NO: 5293 - protein, 13 aa, synthetic construct
GSGSPHSLWSNQQ

SEQ ID NO: 5294 - protein, 13 aa, synthetic construct
GSGSPHSVYLNQQ

SEQ ID NO: 5295 - protein, 13 aa, synthetic construct
GSGSPHSLWLNQQ

SEQ ID NO: 5296 - protein, 13 aa, synthetic construct
GSGSPHSLFRNQQ

SEQ ID NO: 5297 - protein, 6 aa, synthetic construct
TINGHD

SEQ ID NO: 5298 - protein, 6 aa, synthetic construct
MPEGHD

SEQ ID NO: 5299 - protein, 6 aa, synthetic construct
MEGGHD

SEQ ID NO: 5300 - protein, 6 aa, synthetic construct
MEYGHD

SEQ ID NO: 5301 - protein, 6 aa, synthetic construct
AEWGHD

SEQ ID NO: 5302 - protein, 6 aa, synthetic construct
CEWGHD

SEQ ID NO: 5303 - protein, 6 aa, synthetic construct
ANNGQD

SEQ ID NO: 5304 - protein, 6 aa, synthetic construct
IPEGHD

SEQ ID NO: 5305 - protein, 6 aa, synthetic construct
ADMGHD

SEQ ID NO: 5306 - protein, 6 aa, synthetic construct
IEYGHD

SEQ ID NO: 5307 - protein, 6 aa, synthetic construct
ADYGHD

SEQ ID NO: 5308 - protein, 6 aa, synthetic construct
IETGHD

SEQ ID NO: 5309 - protein, 6 aa, synthetic construct
MEWGHD

SEQ ID NO: 5310 - protein, 6 aa, synthetic construct
CEYGHD

SEQ ID NO: 5311 - protein, 6 aa, synthetic construct
RINGHD

SEQ ID NO: 5312 - protein, 6 aa, synthetic construct
MEIGHD

SEQ ID NO: 5313 - protein, 6 aa, synthetic construct
LEYGHD

SEQ ID NO: 5314 - protein, 6 aa, synthetic construct
ADWGHD

SEQ ID NO: 5315 - protein, 6 aa, synthetic construct
IEIGHD

SEQ ID NO: 5316 - protein, 6 aa, synthetic construct
TIKDND

SEQ ID NO: 5317 - protein, 6 aa, synthetic construct
DIMGHD

SEQ ID NO: 5318 - protein, 6 aa, synthetic construct
FEQGHD

SEQ ID NO: 5319 - protein, 6 aa, synthetic construct
MEFGHD

SEQ ID NO: 5320 - protein, 6 aa, synthetic construct
CDQGHD

SEQ ID NO: 5321 - protein, 6 aa, synthetic construct
LPEGHD

SEQ ID NO: 5322 - protein, 6 aa, synthetic construct
IENGHD

SEQ ID NO: 5323 - protein, 6 aa, synthetic construct
MESGHD

SEQ ID NO: 5324 - protein, 6 aa, synthetic construct
AEIGHD

SEQ ID NO: 5325 - protein, 6 aa, synthetic construct
VEYGHD

SEQ ID NO: 5326 - protein, 6 aa, synthetic construct
TSNGDD

SEQ ID NO: 5327 - protein, 6 aa, synthetic construct
IEVGHD

SEQ ID NO: 5328 - protein, 6 aa, synthetic construct
MEMGHD

SEQ ID NO: 5329 - protein, 6 aa, synthetic construct
AEVGHD

SEQ ID NO: 5330 - protein, 6 aa, synthetic construct
MDAGHD

SEQ ID NO: 5331 - protein, 6 aa, synthetic construct
VEWGHD

SEQ ID NO: 5332 - protein, 6 aa, synthetic construct
AEQGHD

SEQ ID NO: 5333 - protein, 6 aa, synthetic construct
LEWGHD

SEQ ID NO: 5334 - protein, 6 aa, synthetic construct
MELGHD

SEQ ID NO: 5335 - protein, 6 aa, synthetic construct
METGHD

SEQ ID NO: 5336 - protein, 6 aa, synthetic construct
MEAGHD

SEQ ID NO: 5337 - protein, 6 aa, synthetic construct
TINRQR

SEQ ID NO: 5338 - protein, 6 aa, synthetic construct
IESGHD

SEQ ID NO: 5339 - protein, 6 aa, synthetic construct
TAKDHD

SEQ ID NO: 5340 - protein, 6 aa, synthetic construct
MEVGHD

SEQ ID NO: 5341 - protein, 6 aa, synthetic construct
CEIGHD

SEQ ID NO: 5342 - protein, 6 aa, synthetic construct
ATNGHD

SEQ ID NO: 5343 - protein, 6 aa, synthetic construct
MDGGHD

SEQ ID NO: 5344 - protein, 6 aa, synthetic construct
QEVGHD

SEQ ID NO: 5345 - protein, 6 aa, synthetic construct
ADQGHD

SEQ ID NO: 5346 - protein, 6 aa, synthetic construct
NMNGHD

SEQ ID NO: 5347 - protein, 6 aa, synthetic construct
TPWEHD

SEQ ID NO: 5348 - protein, 6 aa, synthetic construct
IEMGHD

SEQ ID NO: 5349 - protein, 6 aa, synthetic construct
TANEHD

SEQ ID NO: 5350 - protein, 6 aa, synthetic construct
QQQGHD

SEQ ID NO: 5351 - protein, 6 aa, synthetic construct
TPQDHD

SEQ ID NO: 5352 - protein, 6 aa, synthetic construct
HDWGHD

SEQ ID NO: 5353 - protein, 6 aa, synthetic construct
IEGGHD

SEQ ID NO: 5354 - protein, 11 aa, synthetic construct
TINGHDSPHKR

SEQ ID NO: 5355 - protein, 11 aa, synthetic construct
MPEGHDSPHKS

SEQ ID NO: 5356 - protein, 11 aa, synthetic construct
MEGGHDSPHKS

SEQ ID NO: 5357 - protein, 11 aa, synthetic construct
MEYGHDSPHKS

SEQ ID NO: 5358 - protein, 11 aa, synthetic construct
AEWGHDSPHKS

SEQ ID NO: 5359 - protein, 11 aa, synthetic construct
CEWGHDSPHKS

SEQ ID NO: 5360 - protein, 11 aa, synthetic construct
ANNGQDSPHKS

SEQ ID NO: 5361 - protein, 11 aa, synthetic construct
IPEGHDSPHKS

SEQ ID NO: 5362 - protein, 11 aa, synthetic construct
ADMGHDSPHKS

SEQ ID NO: 5363 - protein, 11 aa, synthetic construct
IEYGHDSPHKS

SEQ ID NO: 5364 - protein, 11 aa, synthetic construct
ADYGHDSPHKS

SEQ ID NO: 5365 - protein, 11 aa, synthetic construct
IETGHDSPHKS

SEQ ID NO: 5366 - protein, 11 aa, synthetic construct
MEWGHDSPHKS

SEQ ID NO: 5367 - protein, 11 aa, synthetic construct
CEYGHDSPHKS

SEQ ID NO: 5368 - protein, 11 aa, synthetic construct
RINGHDSPHKS

SEQ ID NO: 5369 - protein, 11 aa, synthetic construct
MEIGHDSPHKS

SEQ ID NO: 5370 - protein, 11 aa, synthetic construct
LEYGHDSPHKS

SEQ ID NO: 5371 - protein, 11 aa, synthetic construct
ADWGHDSPHKS

SEQ ID NO: 5372 - protein, 11 aa, synthetic construct
IEIGHDSPHKS

SEQ ID NO: 5373 - protein, 11 aa, synthetic construct
TIKDNDSPHKS

SEQ ID NO: 5374 - protein, 11 aa, synthetic construct
DIMGHDSPHKS

SEQ ID NO: 5375 - protein, 11 aa, synthetic construct
FEQGHDSPHKS

SEQ ID NO: 5376 - protein, 11 aa, synthetic construct
MEFGHDSPHKS

SEQ ID NO: 5377 - protein, 11 aa, synthetic construct
CDQGHDSPHKS

SEQ ID NO: 5378 - protein, 11 aa, synthetic construct
LPEGHDSPHKS

SEQ ID NO: 5379 - protein, 11 aa, synthetic construct
IENGHDSPHKS

SEQ ID NO: 5380 - protein, 11 aa, synthetic construct
MESGHDSPHKS

SEQ ID NO: 5381 - protein, 11 aa, synthetic construct
AEIGHDSPHKS

SEQ ID NO: 5382 - protein, 11 aa, synthetic construct
VEYGHDSPHKS

SEQ ID NO: 5383 - protein, 11 aa, synthetic construct
TSNGDDSPHKS

SEQ ID NO: 5384 - protein, 11 aa, synthetic construct
IEVGHDSPHKS

SEQ ID NO: 5385 - protein, 11 aa, synthetic construct
MEMGHDSPHKS

SEQ ID NO: 5386 - protein, 11 aa, synthetic construct
AEVGHDSPHKS

SEQ ID NO: 5387 - protein, 11 aa, synthetic construct
MDAGHDSPHKS

SEQ ID NO: 5388 - protein, 11 aa, synthetic construct
VEWGHDSPHKS

SEQ ID NO: 5389 - protein, 11 aa, synthetic construct
AEQGHDSPHKS

SEQ ID NO: 5390 - protein, 11 aa, synthetic construct
LEWGHDSPHKS

SEQ ID NO: 5391 - protein, 11 aa, synthetic construct
MELGHDSPHKS

SEQ ID NO: 5392 - protein, 11 aa, synthetic construct
METGHDSPHKS

SEQ ID NO: 5393 - protein, 11 aa, synthetic construct
MEAGHDSPHKS

SEQ ID NO: 5394 - protein, 11 aa, synthetic construct
TINRQRSPHKS

SEQ ID NO: 5395 - protein, 11 aa, synthetic construct
IESGHDSPHKS

SEQ ID NO: 5396 - protein, 11 aa, synthetic construct
TAKDHDSPHKS

SEQ ID NO: 5397 - protein, 11 aa, synthetic construct
MEVGHDSPHKS

SEQ ID NO: 5398 - protein, 11 aa, synthetic construct
CEIGHDSPHKS

SEQ ID NO: 5399 - protein, 11 aa, synthetic construct
ATNGHDSPHKS

SEQ ID NO: 5400 - protein, 11 aa, synthetic construct
MDGGHDSPHKS

SEQ ID NO: 5401 - protein, 11 aa, synthetic construct
QEVGHDSPHKS

SEQ ID NO: 5402 - protein, 11 aa, synthetic construct
ADQGHDSPHKS

SEQ ID NO: 5403 - protein, 11 aa, synthetic construct
NMNGHDSPHKS

SEQ ID NO: 5404 - protein, 11 aa, synthetic construct
TPWEHDSPHKS

SEQ ID NO: 5405 - protein, 11 aa, synthetic construct
IEMGHDSPHKS

SEQ ID NO: 5406 - protein, 11 aa, synthetic construct
TANEHDSPHKS

SEQ ID NO: 5407 - protein, 11 aa, synthetic construct
TINGHDSPHKS

SEQ ID NO: 5408 - protein, 11 aa, synthetic construct
QQQGHDSPHKS

SEQ ID NO: 5409 - protein, 11 aa, synthetic construct
TPQDHDSPHKS

SEQ ID NO: 5410 - protein, 11 aa, synthetic construct
HDWGHDSPHKS

SEQ ID NO: 5411 - protein, 11 aa, synthetic construct
IEGGHDSPHKS

SEQ ID NO: 5412-6397 - skipped (986 entries)

SEQ ID NO: 6398 - protein, 4 aa, synthetic construct
SPHK

SEQ ID NO: 6399 - protein, 11 aa, synthetic construct
ERVSGSPHSKA

SEQ ID NO: 6400 - protein, 12 aa, synthetic construct
AEIGHDSPHKSG

SEQ ID NO: 6401-6403 - skipped (3 entries)

SEQ ID NO: 6404 - protein, 27 aa, synthetic construct
KTINGSGQNQQTLKFSVAGPSNMAVQG

SEQ ID NO: 6405 - protein, 12 aa, synthetic construct
KTINGSGQNQQT

SEQ ID NO: 6406 - protein, 8 aa, synthetic construct
GSGQNQQT

SEQ ID NO: 6407 - protein, 5 aa, synthetic construct
GGGGS

SEQ ID NO: 6408 - protein, 10 aa, synthetic construct
GGGGSGGGGS

SEQ ID NO: 6409 - protein, 4 aa, synthetic construct
GSGS

SEQ ID NO: 6410 - protein, 13 aa, synthetic construct
  VARIANT 7: note = S, C, F, or V
  VARIANT 8: note = K, L, R, I, E, Y, V, or S
  VARIANT 9: note = A, R, L, G, I, Y, S, F, or W
  VARIANT 10: note = W, Q, R, G, L, V, S, or F
  VARIANT 11: note = N, Y, R, C, K, or L
  VARIANT 12: note = Q, G, K, R, T, L, or Y
  VARIANT 13: note = Q, L, R, or V
GSGSPHXXXXXXX

SEQ ID NO: 6411 - protein, 12 aa, synthetic construct
  VARIANT 1: note = T, M, A, C, I, R, L, D, F, V, Q, N, or H
  VARIANT 2: note = I, P, E, N, D, S, A, T, M, or Q
  VARIANT 3: note = N, E, G, Y, W, M, T, I, K, Q, F, S, V, A, or L
  VARIANT 4: note = G, D, R, or E
  VARIANT 5: note = H, Q, N, or D
  VARIANT 6: note = D or R
XXXXXXSPHKSG